(19) United States
(12) Patent Application Publication
(10) Pub. No.: US 2004/0053248 A1
(43) Pub. Date: Mar. 18, 2004

(54) Novel nucleic acids and polypeptides

(76) Inventors: Y. Tom Tang, San Jose, CA (US); Chenghua Liu, San Jose, CA (US); Radoje T. Drmanac, Palo Alto, CA (US)

Correspondence Address: NUVELO, 675 ALMANOR AVE., SUNNYVALE, CA, 94085, US

(21) Appl. No.: 10/296,115

(22) PCT Filed: Dec. 22, 2000
(86) PCT No.: PCT/US00/35017

(51) Int. Cl. C12Q 1/68; C07H 21/04; C12N 9/00; C12N 5/06; C12P 21/02

(52) U.S. Cl. 435/6; 435/69.1; 435/183; 435/320.1; 435/325; 536/23.2

(57) ABSTRACT

The present invention provides novel nucleic acids, novel polypeptide sequences encoded by these nucleic acids and uses thereof.

### 1. TECHNICAL FIELD

[0001] The present invention provides novel polynucleotides and proteins encoded by such polynucleotides, along with uses for these polynucleotides and proteins, for example in therapeutic, diagnostic and research methods. 2. BACKGROUND

[0002] Technology aimed at the discovery of protein factors (including e.g., cytokines, such as lymphokines, interferons, CSFs, chemokines, and interleukins) has matured rapidly over the past decade. The now routine hybridization cloning and expression cloning techniques clone novel polynucleotides “directly” in the sense that they rely on information directly related to the discovered protein (i.e., partial DNA/amino acid sequence of the protein in the case of hybridization cloning; activity of the protein in the case of expression cloning). More recent “indirect” cloning techniques such as signal sequence cloning, which isolates DNA sequences based on the presence of a now well-recognized secretory leader sequence motif, as well as various PCR-based or low stringency hybridization-based cloning techniques, have advanced the state of the art by making available large numbers of DNA/amino acid sequences for proteins that are known to have biological activity, for example, by virtue of their secreted nature in the case of leader sequence cloning, by virtue of their cell or tissue source in the case of PCR-based techniques, or by virtue of structural similarity to other genes of known biological activity.

[0003] Identified polynucleotide and polypeptide sequences have numerous applications in, for example, diagnostics, forensics, gene mapping; identification of mutations responsible for genetic disorders or other traits, to assess biodiversity, and to produce many other types of data and products dependent on DNA and amino acid sequences.

### 3. SUMMARY OF THE INVENTION

[0004] The compositions of the present invention include novel isolated polypeptides, novel isolated polynucleotides encoding such polypeptides, including recombinant DNA molecules, cloned genes or degenerate variants thereof, especially naturally occurring variants such as allelic variants, antisense polynucleotide molecules, and antibodies that specifically recognize one or more epitopes present on such polypeptides, as well as hybridomas producing such antibodies.

[0005] The compositions of the present invention additionally include vectors, including expression vectors, containing the polynucleotides of the invention, cells genetically engineered to contain such polynucleotides and cells genetically engineered to express such polynucleotides.

[0006] The present invention relates to a collection or library of at least one novel nucleic acid sequence assembled from expressed sequence tags (ESTs) isolated mainly by sequencing by hybridization (SBH), and in some cases, sequences obtained from one or more public databases. The invention relates also to the proteins encoded by such polynucleotides, along with therapeutic, diagnostic and research utilities for these polynucleotides and proteins. These nucleic acid sequences are designated as SEQ ID NO: 1-739. The polypeptides sequences are designated SEQ ID NO: 740-1478. The nucleic acids and polypeptides are provided in the Sequence Listing. In the nucleic acids provided in the Sequence Listing, A is adenosine; C is cytosine; G is guanine; T is thymine; and N is any of the four bases. In the amino acids provided in the Sequence Listing, * corresponds to the stop codon.

[0007] The nucleic acid sequences of the present invention also include, nucleic acid sequences that hybridize to the complement of SEQ ID NO: 1-739 under stringent hybridization conditions; nucleic acid sequences which are allelic variants or species homologues of any of the nucleic acid sequences recited above, or nucleic acid sequences that encode a peptide comprising a specific domain or truncation of the peptides encoded by SEQ ID NO: 1-739. A polynucleotide comprising a nucleotide sequence having at least 90% identity to an identifying sequence of SEQ ID NO: 1-739 or a degenerate variant or fragment thereof. The identifying sequence can be 100 base pairs in length.

[0008] The nucleic acid sequences of the present invention also include the sequence information from the nucleic acid sequences of SEQ ID NO: 1-739. The sequence information can be a segment of any one of SEQ ID NO: 1-739 that uniquely identifies or represents the sequence information of SEQ ID NO: 1-739.

[0009] A collection as used in this application can be a collection of only one polynucleotide. The collection of sequence information or identifying information of each sequence can be provided on a nucleic acid array. In one embodiment, segments of sequence information is provided on a nucleic acid array to detect the polynucleotide that contains the segment. The array can be designed to detect full-match or mismatch to the polynucleotide that contains the segment. The collection can also be provided in a computer-readable format.

[0010] This invention also includes the reverse or direct complement of any of the nucleic acid sequences recited above; cloning or expression vectors containing the nucleic acid sequences; and host cells or organisms transformed with these expression vectors. Nucleic acid sequences (or their reverse or direct complements) according to the invention have numerous applications in a variety of techniques known to those skilled in the art of molecular biology, such as use as hybridization probes, use as primers for PCR, use in an array, use in computer-readable media, use in sequencing full-length genes, use for chromosome and gene mapping, use in the recombinant production of protein, and use in the generation of anti-sense DNA or RNA, their chemical analogs and the like.

[0011] In a preferred embodiment, the nucleic acid sequences of SEQ ID NO: 1-739 or novel segments or parts of the nucleic acids of the invention are used as primers in expression assays that are well known in the art. In a particularly preferred embodiment, the nucleic acid sequences of SEQ ID NO:1-739 or novel segments or parts of the nucleic acids provided herein are used in diagnostics for identifying expressed genes or, as well known in the art and exemplified by Vollrath et al., Science 258:52-59 (1992), as expressed sequence tags for physical mapping of the human genome.

[0012] The isolated polynucleotides of the invention include, but are not limited to, a polynucleotide comprising any one of the nucleotide sequences set forth in SEQ ID NO: 1-739; a polynucleotide comprising any of the full length protein coding sequences of SEQ ID NO: 1-739; and a polynucleotide comprising any of the nucleotide sequences of the mature protein coding sequences of SEQ ID NO: 1-739. The polynucleotides of the present invention also include, but are not limited to, a polynucleotide that hybridizes under stringent hybridization conditions to (a) the complement of any one of the nucleotide sequences set forth in SEQ ID NO:1-739; (b) a nucleotide sequence encoding any one of the amino acid sequences set forth in the Sequence Listing; (c) a polynucleotide which is an allelic variant of any polynucleotides recited above; (d) a polynucleotide which encodes a species homolog (e.g. orthologs) of any of the proteins recited above; or (e) a polynucleotide that encodes a polypeptide comprising a specific domain or truncation of any of the polypeptides comprising an amino acid sequence set forth in the Sequence Listing.

[0013] The isolated polypeptides of the invention include, but are not limited to, a polypeptide comprising any of the amino acid sequences set forth in the Sequence Listing; or the corresponding full length or mature protein. Polypeptides of the invention also include polypeptides with biological activity that are encoded by (a) any of the polynucleotides having a nucleotide sequence set forth in SEQ ID NO: 1-739; or (b) polynucleotides that hybridize to the complement of the polynucleotides of (a) under stringent hybridization conditions. Biologically or immunologically active variants of any of the polypeptide sequences in the Sequence Listing, and “substantial equivalents” thereof (e.g., with at least about 65%, 70%, 75%, 80%, 85%, 90%, 95%, 98% or 99% amino acid sequence identity) that preferably retain biological activity are also contemplated. The polypeptides of the invention may be wholly or partially chemically synthesized but are preferably produced by recombinant means using the genetically engineered cells (e.g. host cells) of the invention.

[0014] The invention also provides compositions comprising a polypeptide of the invention. Polypeptide compositions of the invention may further comprise an acceptable carrier, such as a hydrophilic, e.g., pharmaceutically acceptable, carrier.

[0015] The invention also provides host cells transformed or transfected with a polynucleotide of the invention.

[0016] The invention also relates to methods for producing a polypeptide of the invention comprising growing a culture of the host cells of the invention in a suitable culture medium under conditions permitting expression of the desired polypeptide, and purifying the polypeptide from the culture or from the host cells. Preferred embodiments include those in which the protein produced by such process is a mature form of the protein.

[0017] Polynucleotides according to the invention have numerous applications in a variety of techniques known to those skilled in the art of molecular biology. These techniques include use as hybridization probes, use as oligomers, or primers, for PCR, use for chromosome and gene mapping, use in the recombinant production of protein, and use in generation of anti-sense DNA or RNA, their chemical analogs and the like. For example, when the expression of an mRNA is largely restricted to a particular cell or tissue type, polynucleotides of the invention can be used as hybridization probes to detect the presence of the particular cell or tissue mRNA in a sample using, e.g., in situ hybridization.

[0018] In other exemplary embodiments, the polynucleotides are used in diagnostics as expressed sequence tags for identifying expressed genes or, as well known in the art and exemplified by Vollrath et al., Science 258:52-59 (1992), as expressed sequence tags for physical mapping of the human genome.

[0019] The polypeptides according to the invention can be used in a variety of conventional procedures and methods that are currently applied to other proteins. For example, a polypeptide of the invention can be used to generate an antibody that specifically binds the polypeptide. Such antibodies, particularly monoclonal antibodies, are useful for detecting or quantitating the polypeptide in tissue. The polypeptides of the invention can also be used as molecular weight markers, and as a food supplement.

[0020] Methods are also provided for preventing, treating, or ameliorating a medical condition which comprises the step of administering to a mammalian subject a therapeutically effective amount of a composition comprising a polypeptide of the present invention and a pharmaceutically acceptable carrier.

[0021] In particular, the polypeptides and polynucleotides of the invention can be utilized, for example, in methods for the prevention and/or treatment of disorders involving aberrant protein expression or biological activity.

[0022] The present invention further relates to methods for detecting the presence of the polynucleotides or polypeptides of the invention in a sample. Such methods can, for example, be utilized as part of prognostic and diagnostic evaluation of disorders as recited herein and for the identification of subjects exhibiting a predisposition to such conditions. The invention provides a method for detecting the polynucleotides of the invention in a sample, comprising contacting the sample with a compound that binds to and forms a complex with the polynucleotide of interest for a period sufficient to form the complex and under conditions sufficient to form a complex and detecting the complex such that if a complex is detected, the polynucleotide of interest is detected. The invention also provides a method for detecting the polypeptides of the invention in a sample comprising contacting the sample with a compound that binds to and forms a complex with the polypeptide under conditions and for a period sufficient to form the complex and detecting the formation of the complex such that if a complex is formed, the polypeptide is detected.

[0023] The invention also provides kits comprising polynucleotide probes and/or monoclonal antibodies, and optionally quantitative standards, for carrying out methods of the invention. Furthermore, the invention provides methods for evaluating the efficacy of drugs, and monitoring the progress of patients, involved in clinical trials for the treatment of disorders as recited above.

[0024] The invention also provides methods for the identification of compounds that modulate (i.e., increase or decrease) the expression or activity of the polynucleotides and/or polypeptides of the invention. Such methods can be utilized, for example, for the identification of compounds that can ameliorate symptoms of disorders as recited herein. Such methods can include, but are not limited to, assays for identifying compounds and other substances that interact with (e.g., bind to) the polypeptides of the invention. The invention provides a method for identifying a compound that binds to the polypeptides of the invention comprising contacting the compound with a polypeptide of the invention in a cell for a time sufficient to form a polypeptide/compound complex, wherein the complex drives expression of a reporter gene sequence in the cell; and detecting the complex by detecting the reporter gene sequence expression such that if expression of the reporter gene is detected the compound the binds to a polypeptide of the invention is identified.

[0025] The methods of the invention also provides methods for treatment which involve the administration of the polynucleotides or polypeptides of the invention to individuals exhibiting symptoms or tendencies. In addition, the invention encompasses methods for treating diseases or disorders as recited herein comprising administering compounds and other substances that modulate the overall activity of the target gene products. Compounds and other substances can effect such modulation either on the level of target gene/protein expression or target protein activity.

[0026] The polypeptides of the present invention and the polynucleotides encoding them are also useful for the same functions known to one of skill in the art as the polypeptides and polynucleotides to which they have homology (set forth in Table 2). If no homology is set forth for a sequence, then the polypeptides and polynucleotides of the present invention are useful for a variety of applications, as described herein, including use in arrays for detection.

### 4. DETAILED DESCRIPTION OF THE INVENTION

### 4.1 DEFINITIONS

[0027] It must be noted that as used herein and in the appended claims, the singular forms “a”, “an” and “the” include plural references unless the context clearly dictates otherwise.

[0028] The term “active” refers to those forms of the polypeptide which retain the biologic and/or immunologic activities of any naturally occurring polypeptide. According to the invention, the terms “biologically active” or “biological activity” refer to a protein or peptide having structural, regulatory or biochemical functions of a naturally occurring molecule. Likewise “immunologically active” or “immunological activity” refers to the capability of the natural, recombinant or synthetic polypeptide to induce a specific immune response in appropriate animals or cells and to bind with specific antibodies.

[0029] The term “activated cells” as used in this application are those cells which are engaged in extracellular or intracellular membrane trafficking, including the export of secretory or enzymatic molecules as part of a normal or disease process.

[0030] The terms “complementary” or “complementarity” refer to the natural binding of polynucleotides by base pairing. For example, the sequence 5′-AGT-3′ binds to the complementary sequence 3′-TCA-5′. Complementarity between two single-stranded molecules may be “partial” such that only some of the nucleic acids bind or it may be “complete” such that total complementarity exists between the single stranded molecules. The degree of complementarity between the nucleic acid strands has significant effects on the efficiency and strength of the hybridization between the nucleic acid strands.

[0031] The term “embryonic stem cells (ES)” refers to a cell that can give rise to many ifferentiated cell types in an embryo or an adult, including the germ cells. The term “germ line stem cells (GSCs)” refers to stem cells derived from primordial stem cells that provide a steady and continuous source of germ cells for the production of gametes. The term “primordial germ cells (PGCs)” refers to a small population of cells set aside from other cell lineages particularly from the yolk sac, mesenteries, or gonadal ridges during embryogenesis that have the potential to differentiate into germ cells and other cells. PGCs are the source from which GSCs and ES cells are derived The PGCs, the GSCs and the ES cells are capable of self-renewal. Thus these cells not only populate the germ line and give rise to a plurality of terminally differentiated cells that comprise the adult specialized organs, but are able to regenerate themselves.

[0032] The term “expression modulating fragment,” EMF, means a series of nucleotides which modulates the expression of an operably linked ORF or another EMF.

[0033] As used herein, a sequence is said to “modulate the expression of an operably linked sequence” when the expression of the sequence is altered by the presence of the EMF. EMFs include, but are not limited to, promoters, and promoter modulating sequences (inducible elements). One class of EMFs are nucleic acid fragments which induce the expression of an operably linked ORF in response to a specific regulatory factor or physiological event.

[0034] The terms “nucleotide sequence” or “nucleic acid” or “polynucleotide” or “oligonculeotide” are used interchangeably and refer to a heteropolymer of nucleotides or the sequence of these nucleotides. These phrases also refer to DNA or RNA of genomic or synthetic origin which may be single-stranded or double-stranded and may represent the sense or the antisense strand, to peptide nucleic acid (PNA) or to any DNA-like or RNA-like material. In the sequences herein A is adenine, C is cytosine, T is thymine, G is guanine and N is A, C, G or T (U). It is contemplated that where the polynucleotide is RNA, the T (thymine) in the sequences provided herein is substituted with U (uracil). Generally, nucleic acid segments provided by this invention may be assembled from fragments of the genome and short oligonucleotide linkers, or from a series of oligonucleotides, or from individual nucleotides, to provide a synthetic nucleic acid which is capable of being expressed in a recombinant transcriptional unit comprising regulatory elements derived from a microbial or viral operon, or a eukaryotic gene.

[0035] The terms “oligonucleotide fragment” or a “polynucleotide fragment”, “portion,” or “segment” or “probe” or “primer” are used interchangeably and refer to a sequence of nucleotide residues which are at least about 5 nucleotides, more preferably at least about 7 nucleotides, more preferably at least about 9 nucleotides, more preferably at least about 11 nucleotides and most preferably at least about 17 nucleotides. The fragment is preferably less than about 500 nucleotides, preferably less than about 200 nucleotides, more preferably less than about 100 nucleotides, more preferably less than about 50 nucleotides and most preferably less than 30 nucleotides. Preferably the probe is from about 6 nucleotides to about 200 nucleotides, preferably from about 15 to about 50 nucleotides, more preferably from about 17 to 30 nucleotides and most preferably from about 20 to 25 nucleotides. Preferably the fragments can be used in polymerase chain reaction (PCR), various hybridization procedures or microarray procedures to identify or amplify identical or related parts of mRNA or DNA molecules. A fragment or segment may uniquely identify each polynucleotide sequence of the present invention. Preferably the fragment comprises a sequence substantially similar to any one of SEQ ID NOs: 1-20.

[0036] Probes may, for example, be used to determine whether specific mRNA molecules are present in a cell or tissue or to isolate similar nucleic acid sequences from chromosomal DNA as described by Walsh et al. (Walsh, P. S. et al., 1992, PCR Methods Appl 1:241-250). They may be labeled by nick translation, Klenow fill-in reaction, PCR, or other methods well known in the art. Probes of the present invention, their preparation and/or labeling are elaborated in Sambrook, J. et al., 1989, Molecular Cloning: A Laboratory Manual, Cold Spring Harbor Laboratory, N.Y.; or Ausubel, F. M. et al., 1989, Current Protocols in Molecular Biology, John Wiley & Sons, New York N.Y., both of which are incorporated herein by reference in their entirety.

[0037] The nucleic acid sequences of the present invention also include the sequence information from the nucleic acid sequences of SEQ ID NO: 1-739. The sequence information can be a segment of any one of SEQ ID NO: 1-739 that uniquely identifies or represents the sequence information of that sequence of SEQ ID NO: 1-739. One such segment can be a twenty-mer nucleic acid sequence because the probability that a twenty-mer is fully matched in the human genome is 1 in 300. In the human genome, there are three billion base pairs in one set of chromosomes. Because 4²⁰ possible twenty-mers exist, there are 300 times more twenty-mers than there are base pairs in a set of human chromosomes. Using the same analysis, the probability for a seventeen-mer to be fully matched in the human genome is approximately 1 in 5. When these segments are used in arrays for expression studies, fifteen-mer segments can be used. The probability that the fifteen-mer is fully matched in the expressed sequences is also approximately one in five because expressed sequences comprise less than approximately 5% of the entire genome sequence.

[0038] Similarly, when using sequence information for detecting a single mismatch, a segment can be a twenty-five mer. The probability that the twenty-five mer would appear in a human genome with a single mismatch is calculated by multiplying the probability for a full match (1÷4²⁵) times the increased probability for mismatch at each nucleotide position (3×25). The probability that an eighteen mer with a single mismatch can be detected in an array for expression studies is approximately one in five. The probability that a twenty-mer with a single mismatch can be detected in a human genome is approximately one in five.

[0039] The term “open reading flame,” ORF, means a series of nucleotide triplets coding for amino acids without any termination codons and is a sequence translatable into protein.

[0040] The terms “operably linked” or “operably associated” refer to functionally related nucleic acid sequences. For example, a promoter is operably associated or operably linked with a coding sequence if the promoter controls the transcription of the coding sequence. While operably linked nucleic acid sequences can be contiguous and in the same reading frame, certain genetic elements e.g. repressor genes are not contiguously linked to the coding sequence but still control transcription/translation of the coding sequence.

[0041] The term “pluripotent” refers to the capability of a cell to differentiate into a number of differentiated cell types that are present in an adult organism. A pluripotent cell is restricted in its differentiation capability in comparison to a totipotent cell.

[0042] The terms “polypeptide” or “peptide” or “amino acid sequence” refer to an oligopeptide, peptide, polypeptide or protein sequence or fragment thereof and to naturally occurring or synthetic molecules. A polypeptide “fragment,” “portion,” or “segment” is a stretch of amino acid residues of at least about 5 amino acids, preferably at least about 7 amino acids, more preferably at least about 9 amino acids and most preferably at least about 17 or more amino acids. The peptide preferably is not greater than about 200 amino acids, more preferably less than 150 amino acids and most preferably less than 100 amino acids. Preferably the peptide is from about 5 to about 200 amino acids. To be active, any polypeptide must have sufficient length to display biological and/or immunological activity.

[0043] The term “naturally occurring polypeptide” refers to polypeptides produced by cells that have not been genetically engineered and specifically contemplates various polypeptides arising from post-translational modifications of the polypeptide including, but not limited to, acetylation, carboxylation, glycosylation, phosphorylation, lipidation and acylation.

[0044] The term “translated protein coding portion” means a sequence which encodes for the full length protein which may include any leader sequence or any processing sequence.

[0045] The term “mature protein coding sequence” means a sequence which encodes a peptide or protein without a signal or leader sequence. The “mature protein portion” means that portion of the protein which does not include a signal or leader sequence. The peptide may have been produced by processing in the cell which removes any leader/signal sequence. The mature protein portion may or may not include the initial methionine residue. The methionine residue may be removed from the protein during processing in the cell. The peptide may be produced synthetically or the protein may have been produced using a polynucleotide only encoding for the mature protein coding sequence.

[0046] The term “derivative” refers to polypeptides chemically modified by such techniques as ubiquitination, labeling (e.g., with radionuclides or various enzymes), covalent polymer attachment such as pegylation (derivatization with polyethylene glycol) and insertion or substitution by chemical synthesis of amino acids such as ornithine, which do not normally occur in human proteins.

[0047] The term “variant” (or “analog”) refers to any polypeptide differing from naturally occurring polypeptides by amino acid insertions, deletions, and substitutions, created using, e g., recombinant DNA techniques. Guidance in determining which amino acid residues may be replaced, added or deleted without abolishing activities of interest, may be found by comparing the sequence of the particular polypeptide with that of homologous peptides and minimizing the number of amino acid sequence changes made in regions of high homology (conserved regions) or by replacing amino acids with consensus sequence.

[0048] Alternatively, recombinant variants encoding these same or similar polypeptides may be synthesized or selected by making use of the “redundancy” in the genetic code. Various codon substitutions, such as the silent changes which produce various restriction sites, may be introduced to optimize cloning into a plasmid or viral vector or expression in a particular prokaryotic or eukaryotic system. Mutations in the polynucleotide sequence may be reflected in the polypeptide or domains of other peptides added to the polypeptide to modify the properties of any part of the polypeptide, to change characteristics such as ligand-binding affinities, interchain affinities, or degradation/turnover rate.

[0049] Preferably, amino acid “substitutions” are the result of replacing one amino acid with another amino acid having similar structural and/or chemical properties, i.e., conservative amino acid replacements. “Conservative” amino acid substitutions may be made on the basis of similarity in polarity, charge, solubility, hydrophobicity, hydrophilicity, and/or the amphipathic nature of the residues involved. For example, nonpolar (hydrophobic) amino acids include alanine, leucine, isoleucine, valine, proline, phenylalanine, tryptophan, and methionine; polar neutral amino acids include glycine, serine, threonine, cysteine, tyrosine, asparagine, and glutamine; positively charged (basic) amino acids include arginine, lysine, and histidine; and negatively charged (acidic) amino acids include aspartic acid and glutamic acid. “Insertions” or “deletions” are preferably in the range of about 1 to 20 amino acids, more preferably 1 to 10 amino acids. The variation allowed may be experimentally determined by systematically making insertions, deletions, or substitutions of amino acids in a polypeptide molecule using recombinant DNA techniques and assaying the resulting recombinant variants for activity.

[0050] Alternatively, where alteration of function is desired, insertions, deletions or non-conservative alterations can be engineered to produce altered polypeptides. Such *alterations can, for example, alter one or more of the biological functions or biochemical characteristics of the polypeptides of the invention. For example, such alterations may change polypeptide characteristics such as ligand-binding affinities, interchain affinities, or degradation/turnover rate. Further, such alterations can be selected so as to generate polypeptides that are better suited for expression, scale up and the like in the host cells chosen for expression. For example, cysteine residues can be deleted or substituted with another amino acid residue in order to eliminate disulfide bridges.

[0051] The terms “purified” or “substantially purified” as used herein denotes that the indicated nucleic acid or polypeptide is present in the substantial absence of other biological macromolecules, e.g., polynucleotides, proteins, and the like. In one embodiment, the polynucleotide or polypeptide is purified such that it constitutes at least 95% by weight, more preferably at least 99% by weight, of the indicated biological macromolecules present (but water, buffers, and other small molecules, especially molecules having a molecular weight of less than 1000 daltons, can be present).

[0052] The term “isolated” as used herein refers to a nucleic acid or polypeptide separated from at least one other component (e.g., nucleic acid or polypeptide) present with the nucleic acid or polypeptide in its natural source. In one embodiment, the nucleic acid or polypeptide is found in the presence of (if anything) only a solvent, buffer, ion, or other component normally present in a solution of the same. The terms “isolated” and “purified” do not encompass nucleic acids or polypeptides present in their natural source.

[0053] The term “recombinant,” when used herein to refer to a polypeptide or protein, means that a polypeptide or protein is derived from recombinant (e.g., microbial, insect, or mammalian) expression systems. “Microbial” refers to recombinant polypeptides or proteins made in bacterial or fungal (e.g., yeast) expression systems. As a product, “recombinant microbial” defines a polypeptide or protein essentially free of native endogenous substances and unaccompanied by associated native glycosylation. Polypeptides or proteins expressed in most bacterial cultures, e.g., E. coli, will be free of glycosylation modifications; polypeptides or proteins expressed in yeast will have a glycosylation pattern in general different from those expressed in mammalian cells.

[0054] The term “recombinant expression vehicle or vector” refers to a plasmid or phage or virus or vector, for expressing a polypeptide from a DNA (RNA) sequence. An expression vehicle can comprise a transcriptional unit comprising an assembly of (1) a genetic element or elements having a regulatory role in gene expression, for example, promoters or enhancers, (2) a structural or coding sequence which is transcribed into mRNA and translated into protein, and (3) appropriate transcription initiation and termination sequences. Structural units intended for use in yeast or eukaryotic expression systems preferably include a leader sequence enabling extracellular secretion of translated protein by a host cell. Alternatively, where recombinant protein is expressed without a leader or transport sequence, it may include an amino terminal methionine residue. This residue may or may not be subsequently cleaved from the expressed recombinant protein to provide a final product.

[0055] The term “recombinant expression system” means host cells which have stably integrated a recombinant transcriptional unit into chromosomal DNA or carry the recombinant transcriptional unit extrachromosomally. Recombinant expression systems as defined herein will express heterologous polypeptides or proteins upon induction of the regulatory elements linked to the DNA segment or synthetic gene to be expressed. This term also means host cells which have stably integrated a recombinant genetic element or elements having a regulatory role in gene expression, for example, promoters or enhancers. Recombinant expression systems as defined herein will express polypeptides or proteins endogenous to the cell upon induction of the regulatory elements linked to the endogenous DNA segment or gene to be expressed. The cells can be prokaryotic or eukaryotic.

[0056] The term “secreted” includes a protein that is transported across or through a membrane, including transport as a result of signal sequences in its amino acid sequence when it is expressed in a suitable host cell. “Secreted” proteins include without limitation proteins secreted wholly (e.g., soluble proteins) or partially (e.g., receptors) from the cell in which they are expressed. “Secreted” proteins also include without limitation proteins that are transported across the membrane of the endoplasmic reticulum. “Secreted” proteins are also intended to include proteins containing non-typical signal sequences (e.g. Interleukin-1 Beta, see Krasney, P. A. and Young, P. R (1992) Cytokine 4(2):134-143) and factors released from damaged cells (e.g. Interleukin-1 Receptor Antagonist, see Arend, W. P. et. al. (1998) Annu. Rev. Immunol. 16:27-55).

[0057] Where desired, an expression vector may be designed to contain a “signal or leader sequence” which will direct the polypeptide through the membrane of a cell. Such sequence may be naturally present on the polypeptides of the present invention or provided from heterologous protein sources by recombinant DNA techniques.

[0058] The term “stringent” is used to refer to conditions that are commonly understood in the art as stringent. Stringent conditions can include highly stringent conditions (i.e., hybridization to filter-bound DNA in 0.5 M NaHPO₄, 7% sodium dodecyl sulfate (SDS), 1 mM EDTA at 65° C., and washing in 0.1×SSC/0.1% SDS at 68° C.), and moderately stringent conditions (i.e., washing in 0.2×SSC/0.1% SDS at 42° C.). Other exemplary hybridization conditions are described herein in the examples.

[0059] In instances of hybridization of deoxyoligonucleotides, additional exemplary stringent hybridization conditions include washing in 6×SSC/0.05% sodium pyrophosphate at 37° C. (for 14-base oligonucleotides), 48° C. (for 17-base oligos), 55° C. (for 20-base oligonucleotides), and 60° C. (for 23-base oligonucleotides).

[0060] As used herein, “substantially equivalent” can refer both to nucleotide and amino acid sequences, for example a mutant sequence, that varies from a reference sequence by one or more substitutions, deletions, or additions, the net effect of which does not result in an adverse functional dissimilarity between the reference and subject sequences. Typically, such a substantially equivalent sequence varies from one of those listed herein by no more than about 35% (i.e., the number of individual residue substitutions, additions, and/or deletions in a substantially equivalent sequence, as compared to the corresponding reference sequence, divided by the total number of residues in the substantially equivalent sequence is about 0.35 or less). Such a sequence is said to have 65% sequence identity to the listed sequence. In one embodiment, a substantially equivalent, e.g., mutant, sequence of the invention varies from a listed sequence by no more than 30% (70% sequence identity); in a variation of this embodiment, by no more than 25% (75% sequence identity); and in a further variation of this embodiment, by no more than 20% (80% sequence identity) and in a firther variation of this embodiment, by no more than 10% (90% sequence identity) and in a further variation of this embodiment, by no more that 5% (95% sequence identity). Substantially equivalent, e.g., mutant, amino acid sequences according to the invention preferably have at least 80% sequence identity with a listed amino acid sequence, more preferably at least 90% sequence identity. Substantially equivalent nucleotide sequences of the invention can have lower percent sequence identities, taking into account, for example, the redundancy or degeneracy of the genetic code. Preferably, nucleotide sequence has at least about 65% identity, more preferably at least about 75% identity, and most preferably at least about 95% identity. For the purposes of the present invention, sequences having substantially equivalent biological activity and substantially equivalent expression characteristics are considered substantially equivalent. For the purposes of determining equivalence, truncation of the mature sequence (e.g., via a mutation which creates a spurious stop codon) should be disregarded. Sequence identity may be determined, e.g., using the Jotun Hein method (Hein, J. (1990) Methods Enzymol. 183:626-645). Identity between sequences can also be determined by other methods known in the art, e.g. by varying hybridization conditions.

[0061] The term “totipotent” refers to the capability of a cell to differentiate into all of the cell types of an adult organism.

[0062] The term “transformation” means introducing DNA into a suitable host cell so that the DNA is replicable, either as an extrachromosomal element, or by chromosomal integration. The term “transfection” refers to the taking up of an expression vector by a suitable host cell, whether or not any coding sequences are in fact expressed. The term “infection” refers to the introduction of nucleic acids into a suitable host cell by use of a virus or viral vector.

[0063] As used herein, an “uptake modulating fragment,” UMF, means a series of nucleotides which mediate the uptake of a linked DNA fragment into a cell. UMFs can be readily identified using known UMFs as a target sequence or target motif with the computer-based systems described below. The presence and activity of a UMF can be confirmed by attaching the suspected UMF to a marker sequence. The resulting nucleic acid molecule is then incubated with an appropriate host under appropriate conditions and the uptake of the marker sequence is determined. As described above, a UMF will increase the frequency of uptake of a linked marker sequence.

[0064] Each of the above terms is meant to encompass all that is described for each, unless the context dictates otherwise.

### 4.2 NUCLEIC ACIDS OF THE INVENTION

[0065] Nucleotide sequences of the invention are set forth in the Sequence Listing.

[0066] The isolated polynucleotides of the invention include a polynucleotide comprising the nucleotide sequences of SEQ ID NO: 1-739 ; a polynucleotide encoding any one of the peptide sequences of SEQ ID NO: 740-1478; and a polynucleotide comprising the nucleotide sequence encoding the mature protein coding sequence of the polypeptides of any one of SEQ ID NO: 740-1478. The polynucleotides of the present invention also include, but are not limited to, a polynucleotide that hybridizes under stringent conditions to (a) the complement of any of the nucleotides sequences of SEQ ID NO: 1-739 ; (b) nucleotide sequences encoding any one of the amino acid sequences set forth in the Sequence Listing; (c) a polynucleotide-which is an allelic variant of any polynucleotide recited above; (d) a polynucleotide which encodes a species homolog of any of the proteins recited above; or (e) a polynucleotide that encodes a polypeptide comprising a specific domain or truncation of the polypeptides of SEQ ID NO: 740-1478. Domains of interest may depend on the nature of the encoded polypeptide; e.g., domains in receptor-like polypeptides include ligand-binding, extracellular, transmembrane, or cytoplasmic domains, or combinations thereof; domains in immunoglobulin-like proteins include the variable immunoglobulin-like domains; domains in enzyme-like polypeptides include catalytic and substrate binding domains; and domains in ligand polypeptides include receptor-binding domains.

[0067] The polynucleotides of the invention include naturally occurring or wholly or partially synthetic DNA, e.g., cDNA and genomic DNA, and RNA, e.g., mRNA. The polynucleotides may include all of the coding region of the cDNA or may represent a portion of the coding region of the cDNA.

[0068] The present invention also provides genes corresponding to the cDNA sequences disclosed herein. The corresponding genes can be isolated in accordance with known methods using the sequence information disclosed herein. Such methods include the preparation of probes or primers from the disclosed sequence information for identification and/or amplification of genes in appropriate genomic libraries or other sources of genomic materials. Further 5′ and 3′ sequence can be obtained using methods known in the art For example, full length cDNA or genomic DNA that corresponds to any of the polynucleotides of SEQ ID NO: 1-739 can be obtained by screening appropriate cDNA or genomic DNA libraries under suitable hybridization conditions using any of the polynucleotides of SEQ ID NO: 1-739or a portion thereof as a probe. Altematively,the polynucleotides of SEQ ID NO: 1-739 may be used as the basis for suitable primer(s) that allow identification and/or amplification of genes in appropriate genomic DNA or cDNA libraries.

[0069] The nucleic acid sequences of the invention can be assembled from ESTs and sequences (including cDNA and genomic sequences) obtained from one or more public databases, such as dbEST, gbpri, and UniGene. The EST sequences can provide identifying sequence information, representative fragment or segment information, or novel segment information for the full-length gene.

[0070] The polynucleotides of the invention also provide polynucleotides including nucleotide sequences that are substantially equivalent to the polynucleotides recited above. Polynucleotides according to the invention can have, e.g., at least about 65%, at least about 70%, at least about 75%, at least about 80%, more typically at least about 90%, and even more typically at least about 95%, sequence identity to a polynucleotide recited above.

[0071] Included within the scope of the nucleic acid sequences of the invention are nucleic acid sequence fragments that hybridize under stringent conditions to any of the nucleotide sequences of SEQ ID NO: 1-739, or complements thereof, which fragment is greater than about 5 nucleotides, preferably 7 nucleotides, more preferably greater than 9 nucleotides and most preferably greater than 17 nucleotides. Fragments of, e.g. 15, 17, or 20 nucleotides or more that are selective for (i.e. specifically hybridize to any one of the polynucleotides of the invention) are contemplated. Probes capable of specifically hybridizing to a polynucleotide can differentiate polynucleotide sequences of the invention from other polynucleotide sequences in the same family of genes or can differentiate human genes from genes of other species, and are preferably based on unique nucleotide sequences.

[0072] The sequences falling within the scope of the present invention are not limited to these specific sequences, but also include allelic and species variations thereof. Allelic and species variations can be routinely determined by comparing the sequence provided SEQ ID NO: 1-739, a representative fragment thereof, or a nucleotide sequence at least 90% identical, preferably 95% identical, to SEQ ID NO: 1-739 with a sequence from another isolate of the same species. Furthermore, to accommodate codon variability, the invention includes nucleic acid molecules coding for the same amino acid sequences as do the specific ORFs disclosed herein. In other words, in the coding region of an ORF, substitution of one codon for another codon that encodes the same amino acid is expressly contemplated.

[0073] The nearest neighbor or homology result for the nucleic acids of the present invention, including SEQ ID NO: 1-739, can be obtained by searching a database using an algorithm or a program. Preferably, a BLAST which stands for Basic Local Alignment Search Tool is used to search for local sequence alignments (Altshul, S. F. J Mol. Evol. 36 290-300 (1993) and Altschul S. F. et al. J. Mol. Biol. 21:403-410 (1990)). Alternatively a FASTA version 3 search against Genpept, using Fastxy algorithm.

[0074] Species homologs (or orthologs) of the disclosed polynucleotides and proteins are also provided by the present invention. Species homologs may be isolated and identified by making suitable probes or primers from the sequences provided herein and screening a suitable nucleic acid source from the desired species.

[0075] The invention also encompasses allelic variants of the disclosed polynucleotides or proteins; that is, naturally-occurring alternative forms of the isolated polynucleotide which also encode proteins which are identical, homologous or related to that encoded by the polynucleotides.

[0076] The nucleic acid sequences of the invention are further directed to sequences which encode variants of the described nucleic acids. These amino acid sequence variants may be prepared by methods known in the art by introducing appropriate nucleotide changes into a native or variant polynucleotide. There are two variables in the construction of amino acid sequence variants: the location of the mutation and the nature of the mutation. Nucleic acids encoding the amino acid sequence variants are preferably constructed by mutating the polynucleotide to encode an amino acid sequence that does not occur in nature. These nucleic acid alterations can be made at sites that differ in the nucleic acids from different species (variable positions) or in highly conserved regions (constant regions). Sites at such locations will typically be modified in series, e.g., by substituting first with conservative choices (e.g., hydrophobic amino acid to a different hydrophobic amino acid) and then with more distant choices (e.g., hydrophobic amino acid to a charged amino acid), and then deletions or insertions may be made at the target site. Amino acid sequence deletions generally range from about 1 to 30 residues, preferably about 1 to 10 residues, and are typically contiguous. Amino acid insertions include amino- and/or carboxyl-terminal fusions ranging in length from one to one hundred or more residues, as well as intrasequence insertions of single or multiple amino acid residues. Intrasequence insertions may range generally from about 1 to 10 amino residues, preferably from 1 to 5 residues. Examples of terminal insertions include the heterologous signal sequences necessary for secretion or for intracellular targeting in different host cells and sequences such as FLAG or poly-histidine sequences useful for purifying the expressed protein.

[0077] In a preferred method, polynucleotides encoding the novel amino acid sequences are changed via site-directed mutagenesis. This method uses oligonucleotide sequences to alter a polynucleotide to encode the desired amino acid variant, as well as sufficient adjacent nucleotides on both sides of the changed amino acid to form a stable duplex on either side of the site of being changed. In general, the techniques of site-directed, mutagenesis are well known to those of skill in the art and this technique is exemplified by publications such as, Edelman et al., DNA 2:183 (1983). A versatile and efficient method for producing site-specific changes in a polynucleotide sequence was published by Zoller and Smith, Nucleic Acids Res. 10:6487-6500 (1982). PCR may also be used to create amino acid sequence variants of the novel nucleic acids. When small amounts of template DNA are used as starting material, primer(s) that differs slightly in sequence from the corresponding region in the template DNA can generate the desired amino acid variant. PCR amplification results in a population of product DNA fragments that differ from the polynucleotide template encoding the polypeptide at the position specified by the primer. The product DNA fragments replace the corresponding region in the plasmid and this gives a polynucleotide encoding the desired amino acid variant.

[0078] A further technique for generating amino acid variants is the cassette mutagenesis technique described in Wells et al., Gene 34:315 (1985); and other mutagenesis techniques well known in the art, such as, for example, the techniques in Sambrook et al., supra, and Current Protocols in Molecular Biology, Ausubel et al. Due to the inherent degeneracy of the genetic code, other DNA sequences which encode substantially the same or a functionally equivalent amino acid sequence may be used in the practice of the invention for the cloning and expression of these novel nucleic acids. Such DNA sequences include those which are capable of hybridizing to the appropriate novel nucleic acid sequence under stringent conditions.

[0079] Polynucleotides encoding preferred polypeptide truncations of the invention can be used to generate polynucleotides encoding chimeric or fusion proteins comprising one or more domains of the invention and heterologous protein sequences.

[0080] The polynucleotides of the invention additionally include the complement of any of the polynucleotides recited above. The polynucleotide can be DNA (genomic, cDNA, amplified, or synthetic) or RNA. Methods and algorithms for obtaining such polynucleotides are well known to those of skill in the art and can include, for example, methods for determining hybridization conditions that can routinely isolate polynucleotides of the desired sequence identities.

[0081] In accordance with the invention, polynucleotide sequences comprising the mature protein coding sequences corresponding to any one of SEQ ID NO: 1-739, or functional equivalents thereof, may be used to generate recombinant DNA molecules that direct the expression of that nucleic acid, or a functional equivalent thereof, in appropriate host cells. Also included are the cDNA inserts of any of the clones identified herein.

[0082] A polynucleotide according to the invention can be joined to any of a variety of other nucleotide sequences by well-established recombinant DNA techniques (see Sambrook J et al. (1989) Molecular Cloning: A Laboratory Manual, Cold Spring Harbor Laboratory, NY). Useful nucleotide sequences for joining to polynucleotides include an assortment of vectors, e.g., plasmids, cosmids, lambda phage derivatives, phagemids, and the like, that are well known in the art. Accordingly, the invention also provides a vector including a polynucleotide of the invention and a host cell containing the polynucleotide. In general, the vector contains an origin of replication functional in at least one organism, convenient restriction endonuclease sites, and a selectable marker for the host cell. Vectors according to the invention include expression vectors, replication vectors, probe generation vectors, and sequencing vectors. A host cell according to the invention can be a prokaryotic or eukaryotic cell and can be a unicellular organism or part of a multicellular organism.

[0083] The present invention further provides recombinant constructs comprising a nucleic acid having any of the nucleotide sequences of SEQ ID NO: 1-739 or a fragment thereof or any other polynucleotides of the invention. In one embodiment, the recombinant constructs of the present invention comprise a vector, such as a plasmid or viral vector, into which a nucleic acid having any of the nucleotide sequences of SEQ ID NO: 1-739 or a fragment thereof is inserted, in a forward or reverse orientation. In the case of a vector comprising one of the ORFs of the present invention, the vector may further comprise regulatory sequences, including for example, a promoter, operably linked to the ORF. Large numbers of suitable vectors and promoters are known to those of skill in the art and are commercially available for generating the recombinant constructs of the present invention. The following vectors are provided by way of example. Bacterial: pBs, phagescript, PsiX174, pBluescript SK, pBs KS, pNH8a, pNH16a, pNH18a, pNH46a (Stratagene); pTrc99A, pKK223-3, pKK233-3, pDR540, pRIT5 (Pharmacia). Eukaryotic: pWLneo, pSV2cat, pOG44, PXTI, pSG (Stratagene) pSVK3, pBPV, pMSG, pSVL (Pharmacia).

[0084] The isolated polynucleotide of the invention may be operably linked to an expression control sequence such as the pMT2 or pED expression vectors disclosed in Kaufman et al., Nucleic Acids Res. 19, 4485-4490 (1991), in order to produce the protein recombinantly. Many suitable expression control sequences are known in the art. General methods of expressing recombinant proteins are also known and are exemplified in R. Kaufman, Methods in Enzymology 185, 537-566 (1990). As defined herein “operably linked” means that the isolated polynucleotide of the invention and an expression control sequence are situated within a vector or cell in such a way that the protein is expressed by a host cell which has been transformed (transfected) with the ligated polynucleotide/expression control sequence.

[0085] Promoter regions can be selected from any desired gene using CAT (chloramphenicol transferase) vectors or other vectors with selectable markers. Two appropriate vectors are pKK232-8 and pCM7. Particular named bacterial promoters include lacI, lacZ, T3, T7, gpt, lambda PR, and trc. Eukaryotic promoters include CMV immediate early, HSV thymidine kinase, early and late SV40, LTRs from retrovirus, and mouse metallothionein-I. Selection of the appropriate vector and promoter is well within the level of ordinary skill in the art. Generally, recombinant expression vectors will include origins of replication and selectable markers permitting transformation of the host cell, e.g., the ampicillin resistance gene of E. coli and S. cerevisiae TRP1 gene, and a promoter derived from a highly-expressed gene to direct transcription of a downstream structural sequence. Such promoters can be derived from operons encoding glycolytic enzymes such as 3-phosphoglycerate kinase (PGK), a-factor, acid phosphatase, or heat shock proteins, among others. The heterologous structural sequence is assembled in appropriate phase with translation initiation and termination sequences, and preferably, a leader sequence capable of directing secretion of translated protein into the periplasmic space or extracellular medium. Optionally, the heterologous sequence can encode a fusion protein including an amino terminal identification peptide imparting desired characteristics, e.g., stabilization or simplified purification of expressed recombinant product. Useful expression vectors for bacterial use are constructed by inserting a structural DNA sequence encoding a desired protein together with suitable translation initiation and termination signals in operable reading phase with a functional promoter. The vector will comprise one or more phenotypic selectable markers and an origin of replication to ensure maintenance of the vector and to, if desirable, provide amplification within the host. Suitable prokaryotic hosts for transformation include E. coli, Bacillus subtilis, Salmonella typhimurium and various species within the genera Pseudomonas, Streptomyces, and Staphylococcus, although others may also be employed as a matter of choice.

[0086] As a representative but non-limiting example, useful expression vectors for bacterial use can comprise a selectable marker and bacterial origin of replication derived from commercially available plasmids comprising genetic elements of the well known cloning vector pBR322 (ATCC 37017). Such commercial vectors include, for example, pKK223-3 (Pharmacia Fine Chemicals, Uppsala, Sweden) and GEM 1 (Promega Biotech, Madison, Wis., USA). These pBR322 “backbone” sections are combined with an appropriate promoter and the structural sequence to be expressed. Following transformation of a suitable host strain and growth of the host strain to an appropriate cell density, the selected promoter is induced or derepressed by appropriate means (e.g., temperature shift or chemical induction) and cells are cultured for an additional period. Cells are typically harvested by centrifugation, disrupted by physical or chemical means, and the resulting crude extract retained for further purification.

[0087] Polynucleotides of the invention can also be used to induce immune responses. For example, as described in Fan et al., Nat. Biotech. 17:870-872 (1999), incorporated herein by reference, nucleic acid sequences encoding a polypeptide may be used to generate antibodies against the encoded polypeptide following topical administration of naked plasmid DNA or following injection, and preferably intramuscular injection of the DNA. The nucleic acid sequences are preferably inserted in a recombinant expression vector and may be in the form of naked DNA.

### 4.3 ANTISENSE

[0088] Another aspect of the invention pertains to isolated antisense nucleic acid molecules that are hybridizable to or complementary to the nucleic acid molecule comprising the nucleotide sequence of SEQ ID NO: 1-739, or fragments, analogs or derivatives thereof. An “antisense” nucleic acid comprises a nucleotide sequence that is complementary to a “sense” nucleic acid encoding a protein, e.g., complementary to the coding strand of a double-stranded cDNA molecule or complementary to an mRNA sequence. In specific aspects, antisense nucleic acid molecules are provided that comprise a sequence complementary to at least about 10, 25, 50, 100, 250 or 500 nucleotides or an entire coding strand, or to only a portion thereof. Nucleic acid molecules encoding fragments, homologs, derivatives and analogs of a protein of any of SEQ ID NO: 740-1478 or antisense nucleic acids complementary to a nucleic acid sequence of SEQ ID NO: 1-739 are additionally provided.

[0089] In one embodiment, an antisense nucleic acid molecule is antisense to a “coding region” of the coding strand of a nucleotide sequence of the invention. The term “coding region” refers to the region of the nucleotide sequence comprising codons which are translated into amino acid residues. In another embodiment, the antisense nucleic acid molecule is antisense to a “noncoding region” of the coding strand of a nucleotide sequence of the invention. The term “noncoding region” refers to 5′ and 3′ sequences which flank the coding region that are not translated into amino acids (i.e., also referred to as 5′ and 3′ untranslated regions).

[0090] Given the coding strand sequences encoding a nucleic acid disclosed herein (e.g., SEQ ID NO: 1-739 , antisense nucleic acids of the invention can be designed according to the rules of Watson and Crick or Hoogsteen base pairing. The antisense nucleic acid molecule can be complementary to the entire coding region of a mRNA, but more preferably is an oligonucleotide that is antisense to only a portion of the coding or noncoding region of a mRNA. For example, the antisense oligonucleotide can be complementary to the region surrounding the translation start site of a mRNA. An antisense oligonucleotide can be, for example, about 5, 10, 15, 20, 25, 30, 35, 40, 45 or 50 nucleotides in length. An antisense nucleic acid of the invention can be constructed using chemical synthesis or enzymatic ligation reactions using procedures known in the art. For example, an antisense nucleic acid (e.g., an antisense oligonucleotide) can be chemically synthesized using naturally occurring nucleotides or variously modified nucleotides designed to increase the biological stability of the molecules or to increase the physical stability of the duplex formed between the antisense and sense nucleic acids, e.g., phosphorothioate derivatives and acridine substituted nucleotides can be used.

[0091] Examples of modified nucleotides that can be used to generate the antisense nucleic acid include: 5-fluorouracil, 5-bromouracil, 5-chlorouracil, 5-iodouracil, hypoxanthine, xanthine, 4-acetylcytosine, 5-(carboxyhydroxylmethyl) uracil, 5-carboxymethylaminomethyl-2-thiouridine, 5-carboxymethylaminomethyluracil, dihydrouracil, beta-D-galactosylqueosine, inosine, N6-isopentenyladenine, 1-methylguanine, 1-methylinosine, 2,2-dimethylguanine, 2-methyladenine, 2-methylguanine, 3-methylcytosine, 5-methylcytosine, N6-adenine, 7-methylguanine, 5-methylaminomethyluracil, 5-methoxyaminomethyl-2-thiouracil, beta-D-mannosylqueosine, 5′-methoxycarboxymethyluracil, 5-methoxyuracil, 2-methylthio-N6-isopentenyladenine, uracil-5-oxyacetic acid (v), wybutoxosine, pseudouracil, queosine, 2-thiocytosine, 5-methyl-2-thiouracil, 2-thiouracil, 4-thiouracil, 5-methyluracil, uracil-5-oxyacetic acid methylester, uracil-5-oxyacetic acid (v), 5-methyl-2-thiouracil, 3-(3-amino-3-N-2-carboxypropyl) uracil, (acp3)w, and 2,6-diaminopurine. Alternatively, the antisense nucleic acid can be produced biologically using an expression vector into which a nucleic acid has been subcloned in an antisense orientation (i.e., RNA transcribed from the inserted nucleic acid will be of an antisense orientation to a target nucleic acid of interest, described further in the following subsection).

[0092] The antisense nucleic acid molecules of the invention are typically administered to a subject or generated in situ such that they hybridize with or bind to cellular mRNA and/or genomic DNA encoding a protein according to the invention to thereby inhibit expression of the protein, e.g., by inhibiting transcription and/or translation. The hybridization can be by conventional nucleotide complementarity to form a stable duplex, or, for example, in the case of an antisense nucleic acid molecule that binds to DNA duplexes, through specific interactions in the major groove of the double helix. An example of a route of administration of antisense nucleic acid molecules of the invention includes direct injection at a tissue site. Alternatively, antisense nucleic acid molecules can be modified to target selected cells and then administered systemically. For example, for systemic administration, antisense molecules can be modified such that they specifically bind to receptors or antigens expressed on a selected cell surface, e.g., by linking the antisense nucleic acid molecules to peptides or antibodies that bind to cell surface receptors or antigens. The antisense nucleic acid molecules can also be delivered to cells using the vectors described herein. To achieve sufficient intracellular concentrations of antisense molecules, vector constructs in which the antisense nucleic acid molecule is placed under the control of a strong pol II or pol III promoter are preferred.

[0093] In yet another embodiment, the antisense nucleic acid molecule of the invention is an α-anomeric nucleic acid molecule. An α-anomeric nucleic acid molecule forms specific double-stranded hybrids with complementary RNA in which, contrary to the usual β-units, the strands run parallel to each other (Gaultier et al. (1987) Nucleic Acids Res 15: 6625-6641). The antisense nucleic acid molecule can also comprise a 2′-o-methylribonucleotide (Inoue et al. (1987) Nucleic Acids Res 15: 6131-6148) or a chimeric RNA-DNA analogue (Inoue et al. (1987) FEBS Lett 215: 327-330).

### 4.4 RIBOZYMES AND PNA MOIETIES

[0094] In still another embodiment, an antisense nucleic acid of the invention is a ribozyme. Ribozymes are catalytic RNA molecules with ribonuclease activity that are capable of cleaving a single-stranded nucleic acid, such as a mRNA, to which they have a complementary region. Thus, ribozymes (e.g., hammerhead ribozymes (described in Haselhoff and Gerlach (1988) Nature 334:585-591)) can be used to catalytically cleave a mRNA transcripts to thereby inhibit translation of a mRNA. A ribozyme having specificity for a nucleic acid of the invention can be designed based upon the nucleotide sequence of a DNA disclosed herein (i.e., SEQ ID NO: 1-739). For example, a derivative of a Tetrahymena L-19 IVS RNA can be constructed in which the nucleotide sequence of the active site is complementary to the nucleotide sequence to be cleaved in a SECX-encoding mRNA. See, e.g., Cech et al. U.S. Pat. No. 4,987,071; and Cech et al. U.S. Pat. No. 5,116,742. Alternatively, SECX mRNA can be used to select a catalytic RNA having a specific ribonuclease activity from a pool of RNA molecules. See, e.g., Bartel et al., (1993) Science 261:1411-1418.

[0095] Alternatively, gene expression can be inhibited by targeting nucleotide sequences complementary to the regulatory region (e.g., promoter and/or enhancers) to form triple helical structures that prevent transcription of the gene in target cells. See generally, Helene. (1991) Anticancer Drug Des. 6: 569-84; Helene. et al. (1992) Ann. N.Y Acad. Sci. 660:27-36; and Maher (1992) Bioassays 14: 807-15.

[0096] In various embodiments, the nucleic acids of the invention can be modified at the base moiety, sugar moiety or phosphate backbone to improve, e.g., the stability, hybridization, or solubility of the molecule. For example, the deoxyribose phosphate backbone of the nucleic acids can be modified to generate peptide nucleic acids (see Hyrup et al. (1996) Bioorg Med Chem 4: 5-23). As used herein, the terms “peptide nucleic acids” or “PNAs” refer to nucleic acid mimics, e.g., DNA mimics, in which the deoxyribose phosphate backbone is replaced by a pseudopeptide backbone and only the four natural nucleobases are retained. The neutral backbone of PNAs has been shown to allow for specific hybridization to DNA and RNA under conditions of low ionic strength. The synthesis of PNA oligomers can be performed using standard solid phase peptide synthesis protocols as described in Hyrup et al. (1996) above; Perry-O'Keefe et al. (1996) PNAS 93: 14670-675.

[0097] PNAs of the invention can be used in therapeutic and diagnostic applications. For example, PNAs can be used as antisense or antigene agents for sequence-specific modulation of gene expression by, e.g., inducing transcription or translation arrest or inhibiting replication. PNAs of the invention can also be used, e.g., in the analysis of single base pair mutations in a gene by, e.g., PNA directed PCR clamping; as artificial restriction enzymes when used in combination with other enzymes, e.g., S1 nucleases (Hyrup B. (1996) above); or as probes or primers for DNA sequence and hybridization (Hyrup et al. (1996), above; Perry-O'Keefe (1996), above).

[0098] In another embodiment, PNAs of the invention can be modified, e.g., to enhance. their stability or cellular uptake, by attaching lipophilic or other helper groups to PNA, by the formation of PNA-DNA chimeras, or by the use of liposomes or other techniques of drug delivery known in the art. For example, PNA-DNA chimeras can be generated that may combine the advantageous properties of PNA and DNA. Such chimeras allow DNA recognition enzymes, e.g., RNase H and DNA polymerases, to interact with the DNA portion while the PNA portion would provide high binding affinity and specificity. PNA-DNA chimeras can be linked using linkers of appropriate lengths selected in terms of base stacking, number of bonds between the nucleobases, and orientation (Hyrup (1996) above). The synthesis of PNA-DNA chimeras can be performed as described in Hyrup (1996) above and Finn et al. (1996) Nucl Acids Res 24: 3357-63. For example, a DNA chain can be synthesized on a solid support using standard phosphoramidite coupling chemistry, and modified nucleoside analogs, e.g., 5′-(4-methoxytrityl)amino-5′-deoxy-thymidine phosphoramidite, can be used between the PNA and the 5′ end of DNA (Mag et al. (1989) Nucl Acid Res 17: 5973-88). PNA monomers are then coupled in a stepwise manner to produce a chimeric molecule with a 5′ PNA segment and a 3′ DNA segment (Finn et al. (1996) above). Alternatively, chimeric molecules can be synthesized with a 5′ DNA segment and a 3′ PNA segment. See, Petersen et al. (1975) Bioorg Med Chem Lett 5: 1119-11124.

[0099] In other embodiments, the oligonucleotide may include other appended groups such as peptides (e.g., for targeting host cell receptors in vivo), or agents facilitating transport across the cell membrane (see, e.g., Letsinger et al., 1989, Proc. Natl. Acad. Sci. U.S.A. 86:6553-6556; Lemaitre et al., 1987, Proc. Natl. Acad. Sci. 84:648-652; PCT Publication No. W088/09810) or the blood-brain barrier (see, e.g., PCT Publication No. W089/10134). In addition, oligonucleotides can be modified with hybridization triggered cleavage agents (See, e.g., Krol et al., 1988, BioTechniques 6:958-976) or intercalating agents. (See, e.g., Zon, 1988, Pharm. Res. 5: 539-549). To this end, the oligonucleotide may be conjugated to another molecule, e.g., a peptide, a hybridization triggered cross-linking agent, a transport agent, a hybridization-triggered cleavage agent, etc.

### 4.5 HOSTS

[0100] The present invention further provides host cells genetically engineered to contain the polynucleotides of the invention. For example, such host cells may contain nucleic acids of the invention introduced into the host cell using known transformation, transfection or infection methods. The present invention still further provides host cells genetically engineered to express the polynucleotides of the invention, wherein such polynucleotides are in operative association with a regulatory sequence heterologous to the host cell which drives expression of the polynucleotides in the cell.

[0101] Knowledge of nucleic acid sequences allows for modification of cells to permit, or increase, expression of endogenous polypeptide. Cells can be modified (e.g., by homologous recombination) to provide increased polypeptide expression by replacing, in whole or in part, the naturally occurring promoter with all or part of a heterologous promoter so that the cells express the polypeptide at higher levels. The heterologous promoter is inserted in such a manner that it is operatively linked to the encoding sequences. See, for example, PCT International Publication No. WO94/12650, PCT International Publication No. WO92/20808, and PCT International Publication No. WO91/09955. It is also contemplated that, in addition to heterologous promoter DNA, amplifiable marker DNA (e.g., ada, dhfr, and the multifunctional CAD gene which encodes carbamyl phosphate synthase, aspartate transcarbamylase, and dihydroorotase) and/or intron DNA may be inserted along with the heterologous promoter DNA. If linked to the coding sequence, amplification of the marker DNA by standard selection methods results in co-amplification of the desired protein coding sequences in the cells.

[0102] The host cell can be a higher eukaryotic host cell, such as a mammalian cell, a lower eukaryotic host cell, such as a yeast cell, or the host cell can be a prokaryotic cell, such as a bacterial cell. Introduction of the recombinant construct into the host cell can be effected by calcium phosphate transfection, DEAE, dextran mediated transfection, or electroporation (Davis, L. et al., Basic Methods in Molecular Biology (1986)). The host cells containing one of the polynucleotides of the invention, can be used in conventional manners to produce the gene product encoded by the isolated fragment (in the case of an ORF) or can be used to produce a heterologous protein under the control of the EMF.

[0103] Any host/vector system can be used to express one or more of the ORFs of the present invention. These include, but are not limited to, eukaryotic hosts such as HeLa cells, Cv-1 cell, COS cells, 293 cells, and Sf9 cells, as well as prokaryotic host such as E. coli and B. subtilis. The most preferred cells are those which do not normally express the particular polypeptide or protein or which expresses the polypeptide or protein at low natural level. Mature proteins can be expressed in mammalian cells, yeast, bacteria, or other cells under the control of appropriate promoters. Cell-free translation systems can also be employed to produce such proteins using RNAs derived from the DNA constructs of the present invention. Appropriate cloning and expression vectors for use with prokaryotic and eukaryotic hosts are described by Sambrook, et al., in Molecular Cloning: A Laboratory Manual, Second Edition, Cold Spring Harbor, N.Y. (1989), the disclosure of which is hereby incorporated by reference.

[0104] Various mammalian cell culture systems can also be employed to express recombinant protein. Examples of mammalian expression systems include the COS-7 lines of monkey kidney fibroblasts, described by Gluzman, Cell 23:175 (1981). Other cell lines capable of expressing a compatible vector are, for example, the C127, monkey COS cells, Chinese Hamster Ovary (CHO) cells, human kidney 293 cells, human epidermal A431 cells, human Colo205 cells, 3T3 cells, CV-1 cells, other transformed primate cell lines, normal diploid cells, cell strains derived from in vitro culture of primary tissue, primary explants, HeLa cells, mouse L cells, BHK, HL-60, U937, HaK or Jurkat cells. Mammalian expression vectors will comprise an origin of replication, a suitable promoter and also any necessary ribosome binding sites, polyadenylation site, splice donor and acceptor sites, transcriptional termination sequences, and 5′ flanking nontranscribed sequences. DNA sequences derived from the SV40 viral genome, for example, SV40 origin, early promoter, enhancer, splice, and polyadenylation sites may be used to provide the required nontranscribed genetic elements. Recombinant polypeptides and proteins produced in bacterial culture are usually isolated by initial extraction from cell pellets, followed by one or more salting-out, aqueous ion exchange or size exclusion chromatography steps. Protein refolding steps can be used, as necessary, in completing configuration of the mature protein. Finally, high performance liquid chromatography (HPLC) can be employed for final purification steps. Microbial cells employed in expression of proteins can be disrupted by any convenient method, including freeze-thaw cycling, sonication, mechanical disruption, or use of cell lysing agents.

[0105] Alternatively, it may be possible to produce the protein in lower eukaryotes such as yeast or insects or in prokaryotes such as bacteria. Potentially suitable yeast strains include Saccharomyces cerevisiae, Schizosaccharomyces pombe, Kluyveromyces strains, Candida, or any yeast strain capable of expressing heterologous proteins. Potentially suitable bacterial strains include Escherichia coli, Bacillus subtilis, Salmonella typhimurium, or any bacterial strain capable of expressing heterologous proteins. If the protein is made in yeast or bacteria, it may be necessary to modify the protein produced therein, for example by phosphorylation or glycosylation of the appropriate sites, in order to obtain the functional protein. Such covalent attachments may be accomplished using known chemical or enzymatic methods.

[0106] In another embodiment of the present invention, cells and tissues may be engineered to express an endogenous gene comprising the polynucleotides of the invention under the control of inducible regulatory elements, in which case the regulatory sequences of the endogenous gene may be replaced by homologous recombination. As described herein, gene targeting can be used to replace a gene's existing regulatory region with a regulatory sequence isolated from a different gene or a novel regulatory sequence synthesized by genetic engineering methods. Such regulatory sequences may be comprised of promoters, enhancers, scaffold-attachment regions, negative regulatory elements, transcriptional initiation sites, regulatory protein binding sites or combinations of said sequences. Alternatively, sequences which affect the structure or stability of the RNA or protein produced may be replaced, removed, added, or otherwise modified by targeting. These sequence include polyadenylation signals, mRNA stability elements, splice sites, leader sequences for enhancing or modifying transport or secretion properties of the protein, or other sequences which alter or improve the function or stability of protein or RNA molecules.

[0107] The targeting event may be a simple insertion of the regulatory sequence, placing the gene under the control of the new regulatory sequence, e.g., inserting a new promoter or enhancer or both upstream of a gene. Alternatively, the targeting event may be a simple deletion of a regulatory element, such as the deletion of a tissue-specific negative regulatory element. Alternatively, the targeting event may replace an existing element; for example, a tissue-specific enhancer can be replaced by an enhancer that has broader or different cell-type specificity than the naturally occurring elements. Here, the naturally occurring sequences are deleted and new sequences are added. In all cases, the identification of the targeting event may be facilitated by the use of one or more selectable marker genes that are contiguous with the targeting DNA, allowing for the selection of cells in which the exogenous DNA has integrated into the host cell genome. The identification of the targeting event may also be facilitated by the use of one or more marker genes exhibiting the property of negative selection, such that the negatively selectable marker is linked to the exogenous DNA, but configured such that the negatively selectable marker flanks the targeting sequence, and such that a correct homologous recombination event with sequences in the host cell genome does not result in the stable integration of the negatively selectable marker. Markers useful for this purpose include the Herpes Simplex Virus thymidine kinase (TK) gene or the bacterial xanthine-guanine phosphoribosyl-transferase (gpt) gene.

[0108] The gene targeting or gene activation techniques which can be used in accordance with this aspect of the invention are more particularly described in U.S. Pat. No. 5,272,071 to Chappel; U.S. Pat. No. 5,578,461 to Sherwin et al.; International Application No. PCT/US92/09627 (WO93/09222) by Selden et al.; and International Application No. PCT/US90/06436 (WO91/06667) by Skoultchi et al., each of which is incorporated by reference herein in its entirety.

### 4.6 POLYPEPTIDES OF THE INVENTION

[0109] The isolated polypeptides of the invention include, but are not limited to, a polypeptide comprising: the amino acid sequences set forth as any one of SEQ ID NO: 740-1478 or an amino acid sequence encoded by any one of the nucleotide sequences SEQ ID NO: 1-739 or the corresponding full length or mature protein. Polypeptides of the invention also include polypeptides preferably with biological or immunological activity that are encoded by: (a) a polynucleotide having any one of the nucleotide sequences set forth in SEQ ID NO: 1-739 or (b) polynucleotides encoding any one of the amino acid sequences set forth as SEQ ID NO: 740-1478 or (c) polynucleotides that hybridize to the complement of the polynucleotides of either (a) or (b) under stringent hybridization conditions. The invention also provides biologically active or immunologically active variants of any of the amino acid sequences set forth as SEQ ID NO: 740-1478 or the corresponding full length or mature protein; and “substantial equivalents” thereof (e.g., with at least about 65%, at least about 70%, at least about 75%, at least about 80%, at least about 85%, at least about 90%, typically at least about 95%, more typically at least about 98%, or most typically at least about 99% amino acid identity) that retain biological activity. Polypeptides encoded by allelic variants may have a similar, increased, or decreased activity compared to polypeptides comprising SEQ ID NO: 740-1478.

[0110] Fragments of the proteins of the present invention which are capable of exhibiting biological activity are also encompassed by the present invention. Fragments of the protein may be in linear form or they may be cyclized using known methods, for example, as described in H. U. Saragovi, et al., Bio/Technology 10, 773-778 (1992) and in R. S. McDowell, et al., J. Amer. Chem. Soc. 114, 9245-9253 (1992), both of which are incorporated herein by reference. Such fragments may be fused to carrier molecules such as immunoglobulins for many purposes, including increasing the valency of protein binding sites.

[0111] The present invention also provides both full-length and mature forms (for example, without a signal sequence or precursor sequence) of the disclosed proteins. The protein coding sequence is identified in the sequence listing by translation of the disclosed nucleotide sequences. The mature form of such protein may be obtained by expression of a full-length polynucleotide in a suitable mammalian cell or other host cell. The sequence of the mature form of the protein is also determinable from the amino acid sequence of the full-length form. Where proteins of the present invention are membrane bound, soluble forms of the proteins are also provided. In such forms, part or all of the regions causing the proteins to be membrane bound are deleted so that the proteins are fully secreted from the cell in which they are expressed.

[0112] Protein compositions of the present invention may further comprise an acceptable carrier, such as a hydrophilic, e.g., pharmaceutically acceptable, carrier.

[0113] The present invention further provides isolated polypeptides encoded by the nucleic acid fragments of the present invention or by degenerate variants of the nucleic acid fragments of the present invention. By “degenerate variant” is intended nucleotide fragments which differ from a nucleic acid fragment of the present invention (e.g., an ORF) by nucleotide sequence but, due to the degeneracy of the genetic code, encode an identical polypeptide sequence. Preferred nucleic acid fragments of the present invention are the ORFs that encode proteins.

[0114] A variety of methodologies known in the art can be utilized to obtain any one of the isolated polypeptides or proteins of the present invention. At the simplest level, the amino acid sequence can be synthesized using commercially available peptide synthesizers. The synthetically-constructed protein sequences, by virtue of sharing primary, secondary or tertiary structural and/or conformational characteristics with proteins may possess biological properties in common therewith, including protein activity. This technique is particularly useful in producing small peptides and fragments of larger polypeptides. Fragments are useful, for example, in generating antibodies against the native polypeptide. Thus, they may be employed as biologically active or immunological substitutes for natural, purified proteins in screening of therapeutic compounds and in immunological processes for the development of antibodies.

[0115] The polypeptides and proteins of the present invention can alternatively be purified from cells which have been altered to express the desired polypeptide or protein. As used herein, a cell is said to be altered to express a desired polypeptide or protein when the cell, through genetic manipulation, is made to produce a polypeptide or protein which it normally does not produce or which the cell normally produces at a lower level. One skilled in the art can readily adapt procedures for introducing and expressing either recombinant or synthetic sequences into eukaryotic or prokaryotic cells in order to generate a cell which produces one of the polypeptides or proteins of the present invention.

[0116] The invention also relates to methods for producing a polypeptide comprising growing a culture of host cells of the invention in a suitable culture medium, and purifying the protein from the cells or the culture in which the cells are grown. For example, the methods of the invention include a process for producing a polypeptide in which a host cell containing a suitable expression vector that includes a polynucleotide of the invention is cultured under conditions that allow expression of the encoded polypeptide. The polypeptide can be recovered from the culture, conveniently from the culture medium, or from a lysate prepared from the host cells and further purified. Preferred embodiments include those in which the protein produced by such process is a full length or mature form of the protein.

[0117] In an alternative method, the polypeptide or protein is purified from bacterial cells which naturally produce the polypeptide or protein. One skilled in the art can readily follow known methods for isolating polypeptides and proteins in order to obtain one of the isolated polypeptides or proteins of the present invention. These include, but are not limited to, immunochromatography, HPLC, size-exclusion chromatography, ion-exchange chromatography, and immuno-affinity chromatography. See, e.g., Scopes, Protein Purification: Principles and Practice, Springer-Verlag (1994); Sambrook, et al., in Molecular Cloning: A Laboratory Manual; Ausubel et al., Current Protocols in Molecular Biology. Polypeptide fragments that retain biological/immunological activity include fragments comprising greater than about 100 amino acids, or greater than about 200 amino acids, and fragments that encode specific protein domains.

[0118] The purified polypeptides can be used in in vitro binding assays which are well known in the art to identify molecules which bind to the polypeptides. These molecules include but are not limited to, for e.g., small molecules, molecules from combinatorial libraries, antibodies or other proteins. The molecules identified in the binding assay are then tested for antagonist or agonist activity in in vivo tissue culture or animal models that are well known in the art. In brief, the molecules are titrated into a plurality of cell cultures or animals and then tested for either cell/animal death or prolonged survival of the animal/cells.

[0119] In addition, the peptides of the invention or molecules capable of binding to the peptides may be complexed with toxins, e.g., ricin or cholera, or with other compounds that are toxic to cells. The toxin-binding molecule complex is then targeted to a tumor or other cell by the specificity of the binding molecule for SEQ ID NO: 740-1478.

[0120] The protein of the invention may also be expressed as a product of transgenic animals, e.g., as a component of the milk of transgenic cows, goats, pigs, or sheep which are characterized by somatic or germ cells containing a nucleotide sequence encoding the protein.

[0121] The proteins provided herein also include proteins characterized by amino acid sequences similar to those of purified proteins but into which modification are naturally provided or deliberately engineered. For example, modifications, in the peptide or DNA sequence, can be made by those skilled in the art using known techniques. Modifications of interest in the protein sequences may include the alteration, substitution, replacement, insertion or deletion of a selected amino acid residue in the coding sequence. For example, one or more of the cysteine residues may be deleted or replaced with another amino acid to alter the conformation of the molecule. Techniques for such alteration, substitution, replacement, insertion or deletion are well known to those skilled in the art (see, e.g., U.S. Pat. No. 4,518,584). Preferably, such alteration, substitution, replacement, insertion or deletion retains the desired activity of the protein. Regions of the protein that are important for the protein function can be determined by various methods known in the art including the alanine-scanning method which involved systematic substitution of single or strings of amino acids with alanine, followed by testing the resulting alanine-containing variant for biological activity. This type of analysis determines the importance of the substituted amino acid(s) in biological activity. Regions of the protein that are important for protein function may be determined by the eMATRIX program.

[0122] Other fragments and derivatives of the sequences of proteins which would be expected to retain protein activity in whole or in part and are useful for screening or other immunological methodologies may also be easily made by those skilled in the art given the disclosures herein. Such modifications are encompassed by the present invention.

[0123] The protein may also be produced by operably linking the isolated polynucleotide of the invention to suitable control sequences in one or more insect expression vectors, and employing an insect expression system. Materials and methods for baculovirus/insect cell expression systems are commercially available in kit form from, e.g., Invitrogen, San Diego, Calif., U.S.A. (the MaxBat™ kit), and such methods are well known in the art, as described in Summers and Smith, Texas Agricultural Experiment Station Bulletin No. 1555 (1987), incorporated herein by reference. As used herein, an insect cell capable of expressing a polynucleotide of the present invention is “transformed.”

[0124] The protein of the invention may be prepared by culturing transformed host cells under culture conditions suitable to express the recombinant protein. The resulting expressed protein may then be purified from such culture (i.e., from culture medium or cell extracts) using known purification processes, such as gel filtration and ion exchange chromatography. The purification of the protein may also include an affinity column containing agents which will bind to the protein; one or more column steps over such affinity resins as concanavalin A-agarose, heparin-toyopearl™ or Cibacrom blue 3GA Sepharose™; one or more steps involving hydrophobic interaction chromatography using such resins as phenyl ether, butyl ether, or propyl ether; or immunoaffinity chromatography.

[0125] Alternatively, the protein of the invention may also be expressed in a form which will facilitate purification. For example, it may be expressed as a fusion protein, such as those of maltose binding protein (MBP), glutathione-S-transferase (GST) or thioredoxin (TRX), or as a His tag. Kits for expression and purification of such fusion proteins are commercially available from New England BioLab (Beverly, Mass.), Pharmacia (Piscataway, N.J.) and Invitrogen, respectively. The protein can also be tagged with an epitope and subsequently purified by using a specific antibody directed to such epitope. One such epitope (“FLAG®”) is commercially available from Kodak (New Haven, Conn.).

[0126] Finally, one or more reverse-phase high performance liquid chromatography (RP-HPLC) steps employing hydrophobic RP-HPLC media, e.g., silica gel having pendant methyl or other aliphatic groups, can be employed to further purify the protein. Some or all of the foregoing purification steps, in various combinations, can also be employed to provide a substantially homogeneous isolated recombinant protein. The protein thus purified is substantially free of other mammalian proteins and is defined in accordance with the present invention as an “isolated protein.”

[0127] The polypeptides of the invention include analogs (variants). This embraces fragments, as well as peptides in which one or more amino acids has been deleted, inserted, or substituted. Also, analogs of the polypeptides of the invention embrace fusions of the polypeptides or modifications of the polypeptides of the invention, wherein the polypeptide or analog is fused to another moiety or moieties, e.g., targeting moiety or another therapeutic agent. Such analogs may exhibit improved properties such as activity and/or stability. Examples of moieties which may be fused to the polypeptide or an analog include, for example, targeting moieties which provide for the delivery of polypeptide to pancreatic cells, e.g., antibodies to pancreatic cells, antibodies to immune cells such as T-cells, monocytes, dendritic cells, granulocytes, etc., as well as receptor and ligands expressed on pancreatic or immune cells. Other moieties which may be fused to the polypeptide include therapeutic agents which are used for treatment, for example, immunosuppressive drugs such as cyclosporin, SK506, azathioprine, CD3 antibodies and steroids. Also, polypeptides may be fused to immune modulators, and other cytokines such as alpha or beta interferon.

### 4.6.1 DETERMINING POLYPEPTIDE AND POLYNUCLEOTIDE IDENTITY AND SIMILARITY

[0128] Preferred identity and/or similarity are designed to give the largest match between the sequences tested. Methods to determine identity and similarity are codified in computer programs including, but are not limited to, the GCG program package, including GAP (Devereux, J., et al., Nucleic Acids Research 12(1):387 (1984); Genetics Computer Group, University of Wisconsin, Madison, Wis.), BLASTP, BLASTN, BLASTX, FASTA (Altschul, S. F. et al., J. Molec. Biol. 215:403-410 (1990), PSI-BLAST Altschul S. F. et al., Nucleic Acids Res. vol. 25, pp. 3389-3402, herein incorporated by eference), eMatrix software (Wu et al., J. Comp. Biol., Vol. 6, pp. 219-235 (1999), wherein incorporated by reference), eMotif software (Nevill-Manning et al, ISMB-97, Vol. 4, pp. 202-209, herein incorporated by reference), pFam software (Sonnhammer et al., Nucleic Acids Res., Vol. 26(1), pp. 320-322 (1998), herein incorporated by reference) and the Kyte-Doolittle hydrophobocity prediction algorithm (J. Mol Biol, 157, pp. 105-31 (1982), incorporated herein by reference). The BLAST programs are publicly available from the National Center for Biotechnology Information (NCBI) and other sources (BLAST Manual, Altschul, S., et al. NCB NLM NIH Bethesda, Md. 20894; Altschul, S., et al., J. Mol. Biol. 215:403-410 (1990).

### 4.7 CHIMERIC AND FUSION PROTEINS

[0129] The invention also provides chimeric or fusion proteins. As used herein, a “chimeric protein” or “fusion protein” comprises a polypeptide of the invention operatively linked to another polypeptide. Within a fusion protein the polypeptide according to the invention can correspond to all or a portion of a protein according to the invention. In one embodiment, a fusion protein comprises at least one biologically active portion of a protein according to the invention. In another embodiment, a fusion protein comprises at least two biologically active portions of a protein according to the invention. Within the fusion protein, the term “operatively linked” is intended to indicate that the polypeptide according to the invention and the other polypeptide are fused in-frame to each other. The polypeptide can be fused to the N-terminus or C-terminus.

[0130] For example, in one embodiment a fusion protein comprises a polypeptide according to the invention operably linked to the extracellular domain of a second protein.

[0131] In another embodiment, the fusion protein is a GST-fusion protein in which the polypeptide sequences of the invention are fused to the C-terminus of the GST (i.e., glutathione S-transferase) sequences.

[0132] In another embodiment, the fusion protein is an immunoglobulin fusion protein in which the polypeptide sequences according to the invention comprises one or more domains are fused to sequences derived from a member of the immunoglobulin protein family. The immunoglobulin fusion proteins of the invention can be incorporated into pharmaceutical compositions and administered to a subject to inhibit an interaction between a ligand and a protein of the invention on the surface of a cell, to thereby suppress signal transduction in vivo. The immunoglobulin fusion proteins can be used to affect the bioavailability of a cognate ligand. Inhibition of the ligand/protein interaction may be useful therapeutically for both the treatment of proliferative and differentiative disorders, e,g., cancer as well as modulating (e.g., promoting or inhibiting) cell survival. Moreover, the immunoglobulin fusion proteins of the invention can be used as immunogens to produce antibodies in a subject, to purify ligands, and in screening assays to identify molecules that inhibit the interaction of a polypeptide of the invention with a ligand.

[0133] A chimeric or fusion protein of the invention can be produced by standard recombinant DNA techniques. For example, DNA fragments coding for the different polypeptide sequences are ligated together in-frame in accordance with conventional techniques, e.g., by employing blunt-ended or stagger-ended termini for ligation, restriction enzyme digestion to provide for appropriate termini, filling-in of cohesive ends as appropriate, alkaline phosphatase treatment to avoid undesirable joining, and enzymatic ligation. In another embodiment, the fusion gene can be synthesized by conventional techniques including automated DNA synthesizers. Alternatively, PCR amplification of gene fragments can be carried out using anchor primers that give rise to complementary overhangs between two consecutive gene fragments that can subsequently be annealed and reamplified to generate a chimeric gene sequence (see, for example, Ausubel et al. (eds.) CURRENT PROTOCOLS IN MOLECULAR BIOLOGY, John Wiley & Sons, 1992). Moreover, many expression vectors are commercially available that already encode a fusion moiety (e.g., a GST polypeptide). A nucleic acid encoding a polypeptide of the invention can be cloned into such an expression vector such that the fusion moiety is linked in-frame to the protein of the invention.

### 4.8 GENE THERAPY

[0134] Mutations in the polynucleotides of the invention gene may result in loss of normal function of the encoded protein. The invention thus provides gene therapy to restore normal activity of the polypeptides of the invention; or to treat disease states involving polypeptides of the invention. Delivery of a functional gene encoding polypeptides of the invention to appropriate cells is effected ex vivo, in situ, or in vivo by use of vectors, and more particularly viral vectors (e.g., adenovirus, adeno-associated virus, or a retrovirus), or ex vivo by use of physical DNA transfer methods (e.g., liposomes or chemical treatments). See, for example, Anderson, Nature, supplement to vol.392, no. 6679, pp.25-20 (1998). For additional reviews of gene therapy technology see Friedmann, Science, 244: 1275-1281 (1989); Verma, Scientific American: 68-84 (1990); and Miller, Nature, 357: 455460 (1992). Introduction of any one of the nucleotides of the present invention or a gene encoding the polypeptides of the present invention can also be accomplished with extrachromosomal substrates (transient expression) or artificial chromosomes (stable expression). Cells may also be cultured ex vivo in the presence of proteins of the present invention in order to proliferate or to produce a desired effect on or activity in such cells. Treated cells can then be introduced in vivo for therapeutic purposes. Alternatively, it is contemplated that in other human disease states, preventing the expression of or inhibiting the activity of polypeptides of the invention will be useful in treating the disease states. It is contemplated that antisense therapy or gene therapy could be applied to negatively regulate the expression of polypeptides of the invention.

[0135] Other methods inhibiting expression of a protein include the introduction of antisense molecules to the nucleic acids of the present invention, their complements, or their translated RNA sequences, by methods known in the art. Further, the polypeptides of the present invention can be inhibited by using targeted deletion methods, or the insertion of a negative regulatory element such as a silencer, which is tissue specific.

[0136] The present invention still further provides cells genetically engineered in vivo to express the polynucleotides of the invention, wherein such polynucleotides are in operative association with a regulatory sequence heterologous to the host cell which drives expression of the polynucleotides in the cell. These methods can be used to increase or decrease the expression of the polynucleotides of the present invention.

[0137] Knowledge of DNA sequences provided by the invention allows for modification of cells to permit, increase, or decrease, expression of endogenous polypeptide. Cells can be modified (e.g., by homologous recombination) to provide increased polypeptide expression by replacing, in whole or in part, the naturally occurring promoter with all or part of a heterologous promoter so that the cells express the protein at higher levels. The heterologous promoter is inserted in such a manner that it is operatively linked to the desired protein encoding sequences. See, for example, PCT International Publication No. WO 94/12650, PCT International Publication No. WO 92/20808, and PCT International Publication No. WO 91/09955. It is also contemplated that, in addition to heterologous promoter DNA, amplifiable marker DNA (e.g., ada, dhfr, and the multifunctional CAD gene which encodes carbamyl phosphate synthase, aspartate transcarbamylase, and dihydroorotase) and/or intron DNA may be inserted along with the heterologous promoter DNA. If linked to the desired protein coding sequence, amplification of the marker DNA by standard selection methods results in co-amplification of the desired protein coding sequences in the cells.

[0138] In another embodiment of the present invention, cells and tissues may be engineered to express an endogenous gene comprising the polynucleotides of the invention under the control of inducible regulatory elements, in which case the regulatory sequences of the endogenous gene may be replaced by homologous recombination. As described herein, gene targeting can be used to replace a gene's existing regulatory region with a regulatory sequence isolated from a different gene or a novel regulatory sequence synthesized by genetic engineering methods. Such regulatory sequences may be comprised of promoters, enhancers, scaffold-attachment regions, negative regulatory elements, transcriptional initiation sites, regulatory protein binding sites or combinations of said sequences. Alternatively, sequences which affect the structure or stability of the RNA or protein produced may be replaced, removed, added, or otherwise modified by targeting. These sequences include polyadenylation signals, mRNA stability elements, splice sites, leader sequences for enhancing or modifying transport or secretion properties of the protein, or other sequences which alter or improve the function or stability of protein or RNA molecules.

[0139] The targeting event may be a simple insertion of the regulatory sequence, placing the gene under the control of the new regulatory sequence, erg., inserting a new promoter or enhancer or both upstream of a gene. Alternatively, the targeting event may be a simple deletion of a regulatory element, such as the deletion of a tissue-specific negative regulatory element. Alternatively,the targeting event may replace an existing element; for example, a tissue-specific enhancer can be replaced by an enhancer that has broader or different cell-type specificity than the naturally occurring elements. Here, the naturally occurring sequences are deleted and new sequences are added. In all cases, the identification of the targeting event may be facilitated by the use of one or more selectable marker genes that are contiguous with the targeting DNA, allowing for the selection of cells in which the exogenous DNA has integrated into the cell genome. The identification of the targeting event may also be facilitated by the use of one or more marker genes exhibiting the property of negative selection, such that the negatively selectable marker is linked to the exogenous DNA, but configured such that the negatively selectable marker flanks the targeting sequence, and such that a correct homologous recombination event with sequences in the host cell genome does not result in the stable integration of the negatively selectable marker. Markers useful for this purpose include the Herpes Simplex Virus thymidine kinase (TK) gene or the bacterial xanthine-guanine phosphoribosyl-transferase (gpt) gene.

[0140] The gene targeting or gene activation techniques which can be used in accordance with this aspect of the invention are more particularly described in U.S. Pat. No. 5,272,071 to Chappel; U.S. Pat. No. 5,578,461 to Sherwin et al.; International Application No. PCT/US92/09627 (WO93/09222) by Selden et al.; and International Application No. PCT/US90/06436 (WO91/06667) by Skoultchi et al., each of which is incorporated by reference herein in its entirety.

### 4.9 TRANSGENIC ANIMALS

[0141] In preferred methods to determine biological functions of the polypeptides of the invention in vivo, one or more genes provided by the invention are either over expressed or inactivated in the germ line of animals using homologous recombination [Capecchi, Science 244:1288-1292 (1989)]. Animals in which the gene is over expressed, under the regulatory control of exogenous or endogenous promoter elements, are known as transgenic animals. Animals in which an endogenous gene has been inactivated by homologous recombination are referred to as “knockout” animals. Knockout animals, preferably non-human mammals, can be prepared as described in U.S. Pat. No. 5,557,032, incorporated herein by reference. Transgenic animals are useful to determine the roles polypeptides of the invention play in biological processes, and preferably in disease states. Transgenic animals are useful as model systems to identify compounds that modulate lipid metabolism. Transgenic animals, preferably non-human mammals, are produced using methods as described in U.S. Pat. No 5,489,743 and PCT Publication No. WO94/28122, incorporated herein by reference.

[0142] Transgenic animals can be prepared wherein all or part of a promoter of the polynucleotides of the invention is either activated or inactivated to alter the level of expression of the polypeptides of the invention. Inactivation can be carried out using homologous recombination methods described above. Activation can be achieved by supplementing or even replacing the homologous promoter to provide for increased protein expression. The homologous promoter can be supplemented by insertion of one or more heterologous enhancer elements known to confer promoter activation in a particular tissue.

[0143] The polynucleotides of the present invention also make possible the development, through, e.g., homologous recombination or knock out strategies, of animals that fail to express polypeptides of the invention or that express a variant polypeptide. Such animals are useful as models for studying the in vivo activities of polypeptide as well as for studying modulators of the polypeptides of the invention.

[0144] In preferred methods to determine biological functions of the polypeptides of the invention in vivo, one or more genes provided by the invention are either over expressed or inactivated in the germ line of animals using homologous recombination [Capecchi, Science 244:1288-1292 (1989)). Animals in which the gene is over expressed, under the regulatory control of exogenous or endogenous promoter elements, are known as transgenic animals. Animals in which an endogenous gene has been inactivated by homologous recombination are referred to as “knockout” animals. Knockout animals, preferably non-human mammals, can be prepared as described in U.S. Pat. No. 5,557,032, incorporated herein by reference. Transgenic animals are useful to determine the roles polypeptides of the invention play in biological processes, and preferably in disease states. Transgenic animals are useful as model systems to identify compounds that modulate lipid metabolism. Transgenic animals, preferably non-human mammals, are produced using methods as described in U.S. Pat. No 5,489,743 and PCT Publication No. WO94/28122, incorporated herein by reference.

[0145] Transgenic animals can be prepared wherein all or part of the polynucleotides of the invention promoter is either activated or inactivated to alter the level of expression of the polypeptides of the invention. Inactivation can be carried out using homologous recombination methods described above. Activation can be achieved by supplementing or even replacing the homologous promoter to provide for increased protein expression. The homologous promoter can be supplemented by insertion of one or more heterologous enhancer elements known to confer promoter activation in a particular tissue.

### 4.10 USES AND BIOLOGICAL ACTIVITY

[0146] The polynucleotides and proteins of the present invention are expected to exhibit one or more of the uses or biological activities (including those associated with assays cited herein) identified herein. Uses or activities described for proteins of the present invention may be provided by administration or use of such proteins or of polynucleotides encoding such proteins (such as, for example, in gene therapies or vectors suitable for introduction of DNA). The mechanism underlying the particular condition or pathology will dictate whether the polypeptides of the invention, the polynucleotides of the invention or modulators (activators or inhibitors) thereof would be beneficial to the subject in need of treatment. Thus, “therapeutic compositions of the invention” include compositions comprising isolated polynucleotides (including recombinant DNA molecules, cloned genes and degenerate variants thereof) or polypeptides of the invention (including full length protein, mature protein and truncations or domains thereof), or compounds and other substances that modulate the overall activity of the target gene products, either at the level of target gene/protein expression or target protein activity. Such modulators include polypeptides, analogs, (variants), including fragments and fusion proteins, antibodies and other binding proteins; chemical compounds that directly or indirectly activate or inhibit the polypeptides of the invention (identified, e.g., via drug screening assays as described herein); antisense polynucleotides and polynucleotides suitable for triple helix formation; and in particular antibodies or other binding partners that specifically recognize one or more epitopes of the polypeptides of the invention.

[0147] The polypeptides of the present invention may likewise be involved in cellular activation or in one of the other physiological pathways described herein.

### 4.10.1 RESEARCH USES AND UTILITIES

[0148] The polynucleotides provided by the present invention can be used by the research community for various purposes. The polynucleotides can be used to express recombinant protein for analysis, characterization or therapeutic use; as markers for tissues in which the corresponding protein is preferentially expressed (either constitutively or at a particular stage of tissue differentiation or development or in disease states); as molecular weight markers on gels; as chromosome markers or tags (when labeled) to identify chromosomes or to map related gene positions; to compare with endogenous DNA sequences in patients to identify potential genetic disorders; as probes to hybridize and thus discover novel, related DNA sequences; as a source of information to derive PCR primers for genetic fingerprinting; as a probe to “subtract-out” known sequences in the process of discovering other novel polynucleotides; for selecting and making oligomers for attachment to a “gene chip” or other support, including for examination of expression patterns; to raise anti-protein antibodies using DNA immunization techniques; and as an antigen to raise anti-DNA antibodies or elicit another immune response. Where the polynucleotide encodes a protein which binds or potentially binds to another protein (such as, for example, in a receptor-ligand interaction), the polynucleotide can also be used in interaction trap assays (such as, for example, that described in Gyuris et al., Cell 75:791-803 (1993)) to identify polynucleotides encoding the other protein with which binding occurs or to identify inhibitors of the binding interaction.

[0149] The polypeptides provided by the present invention can similarly be used in assays to determine biological activity, including in a panel of multiple proteins for high-throughput screening; to raise antibodies or to elicit another immune response; as a reagent (including the labeled reagent) in assays designed to quantitatively determine levels of the protein (or its receptor) in biological fluids; as markers for tissues in which the corresponding polypeptide is preferentially expressed (either constitutively or at a particular stage of tissue differentiation or development or in a disease state); and, of course, to isolate correlative receptors or ligands. Proteins involved in these binding interactions can also be used to screen for peptide or small molecule inhibitors or ago: of the binding interaction.

[0150] Any or all of these research utilities are capable of being developed into reager grade or kit format for commercialization as research products.

[0151] Methods for performing the uses listed above are well known to those skilled ii the art. References disclosing such methods include without limitation “Molecular Cloning: A Laboratory Manual”, 2d ed., Cold Spring Harbor Laboratory Press, Sambrook, J., E. F. Fritsch and T. Maniatis eds., 1989, and “Methods in Enzymology: Guide to Molecular Cloning Techniques”, Academic Press, Berger, S. L. and A. R. Kimmel eds., 1987.

### 4.10.2 NUTRITIONAL USES

[0152] Polynucleotides and polypeptides of the present invention can also be used as nutritional sources or supplements. Such uses include without limitation use as a protein or amino acid supplement, use as a carbon source, use as a nitrogen source and use as a source of carbohydrate. In such cases the polypeptide or polynucleotide of the invention can be added to the feed of a particular organism or can be administered as a separate solid or liquid preparation, such as in the form of powder, pills, solutions, suspensions or capsules. In the case of microorganisms,the polypeptide or polynucleotide of the invention can be added to the medium in or on which the microorganism is cultured.

### 4.10.3 CYTOKINE AND CELL PROLIFERATION/DIFFERENTIATION ACTIVITY

[0153] A polypeptide of the present invention may exhibit activity relating to cytokine, cell proliferation (either inducing or inhibiting) or cell differentiation (either inducing or inhibiting) activity or may induce production of other cytokines in certain cell populations. A polynucleotide of the invention can encode a polypeptide exhibiting such attributes. Many protein factors discovered to date, including all known cytokines, have exhibited activity in one or more factor-dependent cell proliferation assays, and hence the assays serve as a convenient confirmation of cytokine activity. The activity of therapeutic compositions of the present invention is evidenced by any one of a number of routine factor dependent cell proliferation assays for cell lines including, without limitation, 32D, DA2, DA1G, T10, B9, B9/11, BaF3, MC9/G, M+(preB M+), 2E8, RB5, DA1, 123, T1165, HT2, CTLL2, TF-1, Mo7e, CMK, HUVEC, and Caco. Therapeutic compositions of the invention can be used in the following:

[0154] Assays for T-cell or thymocyte proliferation include without limitation those described in: Current Protocols in Immunology, Ed by J. E. Coligan, A. M. Kruisbeek, D. H. Margulies, E. M. Shevach, W. Strober, Pub. Greene Publishing Associates and Wiley-Interscience (Chapter 3, In Vitro assays for Mouse Lymphocyte Function 3.1-3.19; Chapter 7, Immunologic studies in Humans); Takai et al., J. Immunol. 137:3494-3500, 1986; Bertagnolli et al., J. Immunol. 145:1706-1712, 1990; Bertagnolli et al., Cellular Immunology 133:327-341, 1991; Bertagnolli, et al., I. Immunol. 149:3778-3783, 1992; Bowman et al., I. Immunol. 152:1756-1761, 1994.

[0155] Assays for cytokine production and/or proliferation of spleen cells, lymph node cells or thymocytes include, without limitation, those described in: Polyclonal T cell stimulation, Kruisbeek, A. M. and Shevach, E. M. In Current Protocols in Immunology. J. E. e.a. Coligan eds. Vol 1 pp. 3.12.1-3.12.14, John Wiley and Sons, Toronto. 1994; and Measurement of mouse and human interleukin-y, Schreiber, R. D. In Current Protocols in Immunology. J. E. e.a. Coligan eds. Vol 1 pp. 6.8.1-6.8.8, John Wiley and Sons, Toronto. 1994.

[0156] Assays for proliferation and differentiation of hematopoietic and lymphopoietic cells include, without limitation, those described in: Measurement of Human and Murine Interleukin 2 and Interleukin 4, Bottomly, K., Davis, L. S. and Lipsky, P. E. In Current Protocols in Immunology. J. E. e.a Coligan eds. Vol 1 pp. 6.3.1-6.3.12, John Wiley and Sons, Toronto. 1991; deVries et al., J. Exp. Med. 173:1205-1211, 1991; Moreau et al., Nature 336:690-692, 1988; Greenberger et al., Proc. Nati. Acad. Sci. U.S.A. 80:2931-2938, 1983; Measurement of mouse and human interleukin 6—Nordan, R. In Current Protocols in Immunology. J. E. Coligan eds. Vol 1 pp. 6.6.1-6.6.5, John Wiley and Sons, Toronto. 1991; Smith et al., Proc. Natl. Aced. Sci. U.S.A. 83:1857-1861, 1986; Measurement of human Interleukin 11—Bennett, F., Giannotti, J., Clark, S. C. and Turner, K. J. In Current Protocols in Immunology. J. E. Coligan eds. Vol 1 pp. 6.15.1 John Wiley and Sons, Toronto. 1991; Measurement of mouse and human Interleukin 9—Ciarletta, A., Giannotti, J., Clark, S. C. and Turner, K. J. In Current Protocols in Immunology. J. E. Coligan eds. Vol 1 pp. 6.13.1, John Wiley and Sons, Toronto. 1991.

[0157] Assays for T-cell clone responses to antigens (which will identify, among others, proteins that affect APC-T cell interactions as well as direct T-cell effects by measuring proliferation and cytokine production) include, without limitation, those described in: Current Protocols in Immunology, Ed by J. E. Coligan, A. M. Kruisbeek, D. H. Margulies, E. M. Shevach, W Strober, Pub. Greene Publishing Associates and Wiley-Interscience (Chapter 3, In Vitro assays for Mouse Lymphocyte Function; Chapter 6, Cytokines and their cellular receptors; Chapter 7, Immunologic studies in Humans); Weinberger et al., Proc. Natl. Acad. Sci. USA 77:6091-6095, 1980; Weinberger et al., Eur. J. Immun. 11:405-411, 1981; Takai et al., J. Immunol. 137:3494-3500, 1986; Takai et al., J. Immunol. 140:508-512, 1988.

### 4.10.4 STEM CELL GROWTH FACTOR ACTIVITY

[0158] A polypeptide of the present invention may exhibit stem cell growth factor activity and be involved in the proliferation, differentiation and survival of pluripotent and totipotent stem cells including primordial germ cells, embryonic stem cells, hematopoietic stem cells and/or germ line stem cells. Administration of the polypeptide of the invention to stem cells in vivo or ex vivo is expected to maintain and expand cell populations in a totipotential or pluripotential state which would be useful for re-engineering damaged or diseased tissues, transplantation, manufacture of bio-pharmaceuticals and the development of bio-sensors. The ability to produce large quantities of human cells has important working applications for the production of human proteins which currently must be obtained from non-human sources or donors, implantation of cells to treat diseases such as Parkinson's, AIzheimer's and other neurodegenerative diseases; tissues for grafting such as bone marrow, skin, cartilage, tendons, bone, muscle (including cardiac muscle), blood vessels, cornea, neural cells, gastrointestinal cells and others; and organs for transplantation such as kidney, liver, pancreas (including islet cells), heart and lung.

[0159] It is contemplated that multiple different exogenous growth factors and/or cytokines may be administered in combination with the polypeptide of the invention to achieve the desired effect, including any of the growth factors listed herein, other stem cell maintenance factors, and specifically including stem cell factor (SCF), leukemia inhibitory factor (LIF), Flt-3 ligand (Flt-3L), any of the interleukins, recombinant soluble IL-6 receptor fused to IL-6, macrophage inflammatory protein 1-alpha (MIP-1-alpha), G-CSF, GM-CSF, thrombopoietin (TPO), platelet factor 4 (PF-4), platelet-derived growth factor (PDGF), neural growth factors and basic fibroblast growth factor (bFGF).

[0160] Since totipotent stem cells can give rise to virtually any mature cell type, expansion of these cells in culture will facilitate the production of large quantities of mature cells. Techniques for culturing stem cells are known in the art and administration of polypeptides of the invention, optionally with other growth factors and/or cytokines, is expected to enhance the survival and proliferation of the stem cell populations. This can be accomplished by direct administration of the polypeptide of the invention to the culture medium. Alternatively, stroma cells transfected with a polynucleotide that encodes for the polypeptide of the invention can be used as a feeder layer for the stem cell populations in culture or in vivo. Stromal support cells for feeder layers may include embryonic bone marrow fibroblasts, bone marrow stromal cells, fetal liver cells, or cultured embryonic fibroblasts (see U.S. Pat. No. 5,690,926).

[0161] Stem cells themselves can be transfected with a polynucleotide of the invention to induce autocrine expression of the polypeptide of the invention. This will allow for generation of undifferentiated totipotential/pluripotential stem cell lines that are useful as is or that can then be differentiated into the desired mature cell types. These stable cell lines can also serve as a source of undifferentiated totipotential/pluripotential mRNA to create cDNA libraries and templates for polymerase chain reaction experiments. These studies would allow for the isolation and identification of differentially expressed genes in stem cell populations that regulate stem cell proliferation and/or maintenance.

[0162] Expansion and maintenance of totipotent stem cell populations will be useful in the treatment of many pathological conditions. For example, polypeptides of the present invention may be used to manipulate stem cells in culture to give rise to neuroepithelial cells that can be used to augment or replace cells damaged by illness, autoimmune disease, accidental damage or genetic disorders. The polypeptide of the invention may be useful for inducing the proliferation of neural cells and for the regeneration of nerve and brain tissue, i.e. for the treatment of central and peripheral nervous system diseases and neuropathies, as well as mechanical and traumatic disorders which involve degeneration, death or trauma to neural cells or nerve tissue. In addition, the expanded stem cell populations can also be genetically altered for gene therapy purposes and to decrease host rejection of replacement tissues after grafting or implantation.

[0163] Expression of the polypeptide of the invention and its effect on stem cells can also be manipulated to achieve controlled differentiation of the stem cells into more differentiated cell types. A broadly applicable method of obtaining pure populations of a specific differentiated cell type from undifferentiated stem cell populations involves the use of a cell-type specific promoter driving a selectable marker. The selectable marker allows only cells of the desired type to survive. For example, stem cells can be induced to differentiate into cardiomyocytes (Wobus et al., Differentiation, 48: 173-182, (1991); Klug et al., J. Clin. Invest., 98(1): 216-224, (1998)) or skeletal muscle cells (Browder, L. W. In: Principles of Tissue Engineering eds. Lanza et al., Academic Press (1997)). Alternatively, directed differentiation of stem cells can be accomplished by culturing the stem cells in the presence of a differentiation factor such as retinoic acid and an antagonist of the polypeptide of the invention which would inhibit the effects of endogenous stem cell factor activity and allow differentiation to proceed.

[0164] In vitro cultures of stem cells can be used to determine if the polypeptide of the invention exhibits stem cell growth factor activity. Stem cells are isolated from any one of various cell sources (including hematopoietic stem cells and embryonic stem cells) and cultured on a feeder layer, as described by Thompson et al. Proc. Natl. Acad. Sci, U.S.A., 92: 7844-7848 (1995), in the presence of the polypeptide of the invention alone or in combination with other growth factors or cytokines. The ability of the polypeptide of the invention to induce stem cells proliferation is determined by colony formation on semi-solid support e.g. as described by Bernstein et al., Blood, 77: 2316-2321 (1991).

### 4.10.5 HEMATOPOIESIS REGULATING ACTIVITY

[0165] A polypeptide of the present invention may be involved in regulation of ematopoiesis and, consequently, in the treatment of myeloid or lymphoid cell disorders. Even marginal biological activity in support of colony forming cells or of factor-dependent cell lines indicates involvement in regulating hematopoiesis, e.g. in supporting the growth and proliferation of erythroid progenitor cells alone or in combination with other cytokines, thereby indicating utility, for example, in treating various anemias or for use in conjunction with irradiation/chemotherapy to stimulate the production of erythroid precursors and/or erythroid cells; in supporting the growth and proliferation of myeloid cells such as granulocytes and monocytes/macrophages (i.e., traditional CSF activity) useful, for example, in conjunction with chemotherapy to prevent or treat consequent myelo-suppression; in supporting the growth and proliferation of megakaryocytes and consequently of platelets thereby allowing prevention or treatment of various platelet disorders such as thrombocytopenia, and generally for use in place of or complimentary to platelet transfusions; and/or in supporting the growth and proliferation of hematopoietic stem cells which are capable of maturing to any and all of the above-mentioned hematopoietic cells and therefore find therapeutic utility in various stem cell disorders (such as those usually treated with transplantation, including, without limitation, aplastic anemia and paroxysmal nocturnal hemoglobinuria), as well as in repopulating the stem cell compartment post irradiation/chemotherapy, either in-vivo or ex-vivo (i.e., in conjunction with bone marrow transplantation or with peripheral progenitor cell transplantation (homologous or heterologous)) as normal cells or genetically manipulated for gene therapy.

[0166] Therapeutic compositions of the invention can be used in the following:

[0167] Suitable assays for proliferation and differentiation of various hematopoietic lines are cited above.

[0168] Assays for embryonic stem cell differentiation (which will identify, among others, proteins that influence embryonic differentiation hematopoiesis) include, without limitation, those described in: Johansson et al. Cellular Biology 15:141-151, 1995; Keller et al., Molecular and Cellular Biology 13:473-486, 1993; McClanahan et al., Blood 81:2903-2915, 1993.

[0169] Assays for stem cell survival and differentiation (which will identify, among others, proteins that regulate lympho-hematopoiesis) include, without limitation, those escribed in: Methylcellulose colony forming assays, Freshney, M. G. In Culture of Hematopoietic Cells. R. I. Freshney, et al. eds. Vol pp.265-268, Wiley-Liss, Inc., New York, N.Y. 1994; Hirayama et al., Proc. Natl. Acad. Sci. USA 89:5907-5911, 1992; Primitive hematopoietic colony forming cells with high proliferative potential, McNiece, I. K. and Briddell, R. A. In Culture of Hematopoietic Cells. R. I. Freshney, et al. eds. Vol pp. 23-39, Wiley-Liss, Inc., New York, N.Y. 1994; Neben et al., Experimental Hematology 22:353-359, 1994; Cobblestone area forming cell assay, Ploemacher, R E. In Culture of Hematopoietic Cells. R. I. Freshney, et al. eds. Vol pp. 1-21, Wiley-Liss, Inc., New York, N.Y. 1994; Long term bone marrow cultures in the presence of stromal cells, Spooncer, E., Dexter, M. and Allen, T. In Culture of Hematopoietic Cells. R. I. Freshney, et al. eds. Vol pp. 163-179, Wiley-Liss, Inc., New York, N.Y. 1994; Long term culture initiating cell assay, Sutherland, H. J. In Culture of Hematopoietic Cells. R I. Freshney, et al. eds. Vol pp.139-162, Wiley-Liss, Inc., New York, N.Y. 1994.

### 4.10.6 TISSUE GROWTH ACTIVITY

[0170] A polypeptide of the present invention also may be involved in bone, cartilage, tendon, ligament and/or nerve tissue growth or regeneration, as well as in wound healing and tissue repair and replacement, and in healing of burns, incisions and ulcers.

[0171] A polypeptide of the present invention which induces cartilage and/or bone growth in circumstances where bone is not normally formed, has application in the healing of bone fractures and cartilage damage or defects in humans and other animals. Compositions of a polypeptide, antibody, binding partner, or other modulator of the invention may have prophylactic use in closed as well as open fracture reduction and also in the improved fixation of artificial joints. De novo bone formation induced by an osteogenic agent contributes to the repair of congenital, trauma induced, or oncologic resection induced craniofacial defects, and also is useful in cosmetic plastic surgery.

[0172] A polypeptide of this invention may also be involved in attracting bone-forming cells, stimulating growth of bone-forming cells, or inducing differentiation of progenitors of bone-forming cells. Treatment of osteoporosis, osteoarthritis, bone degenerative disorders, or periodontal disease, such as through stimulation of bone and/or cartilage repair or by blocking inflammation or processes of tissue destruction (collagenase activity, osteoclast activity, etc.) mediated by inflammatory processes may also be possible using the composition of the invention.

[0173] Another category of tissue regeneration activity that may involve the polypeptide of the present invention is tendon/ligament formation. Induction of tendon/ligament-like tissue or other tissue formation in circumstances where such tissue is not normally formed, has application in the healing of tendon or ligament tears, deformities and other tendon or ligament defects in humans and other animals. Such a preparation employing a tendon/ligament-like tissue inducing protein may have prophylactic use in preventing damage to tendon or ligament tissue, as well as use in the improved fixation of tendon or ligament to bone or other tissues, and in repairing defects to tendon or ligament tissue. De novo tendon/ligament-like tissue formation induced by a composition of the present invention contributes to the repair of congenital, trauma induced, or other tendon or ligament defects of other origin, and is also useful in cosmetic plastic surgery for attachment or repair of tendons or ligaments. The compositions of the present invention may provide environment to attract tendon- or ligament-forming cells, stimulate growth of tendon- or ligament-forming cells, induce differentiation of progenitors of tendon- or ligament-forming cells, or induce growth of tendon/ligament cells or progenitors ex vivo for return in vivo to effect tissue repair. The compositions of the invention may also be useful in the treatment of tendinitis, carpal tunnel syndrome and other tendon or ligament defects. The compositions may also include an appropriate matrix and/or sequestering agent as a carrier as is well known in the art.

[0174] The compositions of the present invention may also be useful for proliferation of neural cells and for regeneration of nerve and brain tissue, i.e. for the treatment of central and peripheral nervous system diseases and neuropathies, as well as mechanical and traumatic disorders, which involve degeneration, death or trauma to neural cells or nerve tissue. More specifically, a composition may be used in the treatment of diseases of the peripheral nervous system, such as peripheral nerve injuries, peripheral neuropathy and localized neuropathies, and central nervous system diseases, such as Alzheimer's, Parkinson's disease, Huntington's disease, amyotrophic lateral sclerosis, and Shy-Drager syndrome. Further conditions which may be treated in accordance with the present invention include mechanical and traumatic disorders, such as spinal cord disorders, head trauma and cerebrovascular diseases such as stroke. Peripheral neuropathies resulting from chemotherapy or other medical therapies may also be treatable using a composition of the invention.

[0175] Compositions of the invention may also be useful to promote better or faster closure of non-healing wounds, including without limitation pressure ulcers, ulcers associated with vascular insufficiency, surgical and traumatic wounds, and the like.

[0176] Compositions of the present invention may also be involved in the generation or regeneration of other tissues, such as organs (including, for example, pancreas, liver, intestine, kidney, skin, endothelium), muscle (smooth, skeletal or cardiac) and vascular (including vascular endothelium) tissue, or for promoting the growth of cells comprising such tissues. Part of the desired effects may be by inhibition or modulation of fibrotic scarring may allow normal tissue to regenerate. A polypeptide of the present invention may also exhibit angiogenic activity.

[0177] A composition of the present invention may also be useful for gut protection or regeneration and treatment of lung or liver fibrosis, reperfusion injury in various tissues, and conditions resulting from systemic cytokine damage.

[0178] A composition of the present invention may also be useful for promoting or inhibiting differentiation of tissues described above from precursor tissues or cells; or for inhibiting the growth of tissues described above.

[0179] Therapeutic compositions of the invention can be used in the following:

[0180] Assays for tissue generation activity include, without limitation, those described in: International Patent Publication No. WO95/16035 (bone, cartilage, tendon); International Patent Publication No. WO95/05846 (nerve, neuronal); International Patent Publication No. WO91/07491 (skin, endothelium).

[0181] Assays for wound healing activity include, without limitation, those described in: Winter, Epidermal Wound Healing, pps. 71-112 (Maibach, H. I. and Rovee, D. T., eds.), Year Book Medical Publishers, Inc., Chicago, as modified by Eaglstein and Mertz, J. Invest. Dermatol 71:382-84 (1978).

### 4.10.7 IMMUNE STIMULATING OR SUPPRESSING ACTIVITY

[0182] A polypeptide of the present invention may also exhibit immune stimulating or immune suppressing activity, including without limitation the activities for which assays are described herein. A polynucleotide of the invention can encode a polypeptide exhibiting such activities. A protein may be useful in the treatment of various immune deficiencies and disorders (including severe combined immunodeficiency (SCID)), e.g., in regulating (up or down) growth and proliferation of T and/or B lymphocytes, as well as effecting the cytolytic activity of NK cells and other cell populations. These immune deficiencies may be genetic or be caused by viral (e.g., HIV) as well as bacterial or fungal infections, or may result from autoimmune disorders. More specifically, infectious diseases causes by viral, bacterial, fungal or other infection may be treatable using a protein of the present invention, including infections by HIV, hepatitis viruses, herpes viruses, mycobacteria, Leishmania spp., malaria spp. and various fungal infections such as candidiasis. Of course, in this regard, proteins of the present invention may also be useful where a boost to the immune system generally may be desirable, i.e., in the treatment of cancer.

[0183] Autoimmune disorders which may be treated using a protein of the present invention include, for example, connective tissue disease, multiple sclerosis, systemic lupus erythematosus, rheumatoid arthritis, autoimmune pulmonary inflammation, Guillain-Barre syndrome, autoimmune thyroiditis, insulin dependent diabetes mellitis, myasthenia gravis, graft-versus-host disease and autoimmune inflammatory eye disease. Such a protein (or antagonists thereof, including antibodies) of the present invention may also to be useful in the treatment of allergic reactions and conditions (e.g., anaphylaxis, serum sickness, drug reactions, food allergies, insect venom allergies, mastocytosis, allergic rhinitis, hypersensitivity pneumonitis, urticaria, angioedema, eczema, atopic dermatitis, allergic contact dermatitis, erythema multiforme, Stevens-Johnson syndrome, allergic conjunctivitis, atopic keratoconjunctivitis, venereal keratoconjunctivitis, giant papillary conjunctivitis and contact allergies), such as asthma (particularly allergic asthma) or other respiratory problems. Other conditions, in which immune suppression is desired (including, for example, organ transplantation), may also be treatable using a protein (or antagonists thereof) of the present invention. The therapeutic effects of the polypeptides or antagonists thereof on allergic reactions can be evaluated by in vivo animals models such as the cumulative contact enhancement test (Lastbom et al., Toxicology 125: 59-66, 1998), skin prick test (Hoffmann et al., Allergy 54: 446-54, 1999), guinea pig skin sensitization test (Vohr et al., Arch. Toxocol. 73: 501-9), and murine local lymph node assay (Kimber et al., J. Toxicol. Environ. Health 53: 563-79).

[0184] Using the proteins of the invention it may also be possible to modulate immune responses, in a number of ways. Down regulation may be in the form of inhibiting or blocking an immune response already in progress or may involve preventing the induction of an immune response. The functions of activated T cells may be inhibited by suppressing T cell responses or by inducing specific tolerance in T cells, or both. Immunosuppression of T cell responses is generally an active, non-antigen-specific, process which requires continuous exposure of the T cells to the suppressive agent. Tolerance, which involves inducing non-responsiveness or anergy in T cells, is distinguishable from immunosuppression in that it is generally antigen-specific and persists after exposure to the tolerizing agent has ceased. Operationally, tolerance can be demonstrated by the lack of a T cell response upon reexposure to specific antigen in the absence of the tolerizing agent.

[0185] Down regulating or preventing one or more antigen functions (including without limitation B lymphocyte antigen functions (such as, for example, B7)), e.g., preventing high level lymphokine synthesis by activated T cells, will be useful in situations of tissue, skin and organ transplantation and in graft-versus-host disease (GVHD). For example, blockage of T cell function should result in reduced tissue destruction in tissue transplantation. Typically, in tissue transplants, rejection of the transplant is initiated through its recognition as foreign by T cells, followed by an immune reaction that destroys the transplant. The administration of a therapeutic composition of the invention may prevent cytokine synthesis by immune cells, such as T cells, and thus acts as an immunosuppressant. Moreover, a lack of costimulation may also be sufficient to anergize the T cells, thereby inducing tolerance in a subject. Induction of long-term tolerance by B lymphocyte antigen-blocking reagents may avoid the necessity of repeated administration of these blocking reagents. To achieve sufficient immunosuppression or tolerance in a subject, it may also be necessary to block the function of a combination of B lymphocyte antigens.

[0186] The efficacy of particular therapeutic compositions in preventing organ transplant rejection or GVHD can be assessed using animal models that are predictive of efficacy in humans. Examples of appropriate systems which can be used include allogeneic cardiac grafts in rats and xenogeneic pancreatic islet cell grafts in mice, both of which have been used to examine the immunosuppressive effects of CTLA4Ig fusion proteins in vivo as described in Lenschow et al., Science 257:789-792 (1992) and Turka et al., Proc. Natl. Acad. Sci USA, 89:11102-11105 (1992). In addition, murine models of GVHD (see Paul ed., Fundamental Immunology, Raven Press, New York, 1989, pp. 846-847) can be used to determine the effect of therapeutic compositions of the invention on the development of that disease.

[0187] Blocking antigen function may also be therapeutically useful for treating autoimmune diseases. Many autoimmune disorders are the result of inappropriate activation of T cells that are reactive against self tissue and which promote the production of cytokines and autoantibodies involved in the pathology of the diseases. Preventing the activation of autoreactive T cells may reduce or eliminate disease symptoms. Administration of reagents which block stimulation of T cells can be used to inhibit T cell activation and prevent production of autoantibodies or T cell-derived cytokines which may be involved in the disease process. Additionally, blocking reagents may induce antigen-specific tolerance of autoreactive T cells which could lead to long-term relief from the disease. The efficacy of blocking reagents in preventing or alleviating autoimmune disorders can be determined using a number of well-characterized animal models of human autoimmune diseases. Examples include murine experimental autoimmune encephalitis, systemic lupus erythmatosis in MRL/lpr/lpr mice or NZB hybrid mice, murine autoimmune collagen arthritis, diabetes mellitus in NOD mice and BB rats, and murine experimental myasthenia gravis (see Paul ed., Fundamental Immunology, Raven Press, New York, 1989, pp. 840-856).

[0188] Upregulation of an antigen function (e.g., a B lymphocyte antigen function), as a means of up regulating immune responses, may also be useful in therapy. Upregulation of immune responses may be in the form of enhancing an existing immune response or eliciting an initial immune response. For example, enhancing an immune response may be useful in cases of viral infection, including systemic viral diseases such as influenza, the common cold, and encephalitis.

[0189] Alternatively, anti-viral immune responses may be enhanced in an infected patient by removing T cells from the patient, costimulating the T cells in vitro with viral antigen-pulsed APCs either expressing a peptide of the present invention or together with a stimulatory form of a soluble peptide of the present invention and reintroducing the in vitro activated T cells into the patient. Another method of enhancing anti-viral immune responses would be to isolate infected cells from a patient, transfect them with a nucleic acid encoding a protein of the present invention as described herein such that the cells express all or a portion of the protein on their surface, and reintroduce the transfected cells into the patient. The infected cells would now be capable of delivering a costimulatory signal to, and thereby activate, T cells in vivo.

[0190] A polypeptide of the present invention may provide the necessary stimulation signal to T cells to induce a T cell mediated immune response against the transfected tumor cells. In addition, tumor cells which lack MHC class I or MHC class II molecules, or which fail to reexpress sufficient mounts of MHC class I or MHC class II molecules, can be transfected with nucleic acid encoding all or a portion of (e.g., a cytoplasmic-domain truncated portion) of an MHC class I alpha chain protein and β₂ microglobulin protein or an MHC class II alpha chain protein and an MHC class II beta chain protein to thereby express MUC class I or MHC class II proteins on the cell surface. Expression of the appropriate class I or class II MHC in conjunction with a peptide having the activity of a B lymphocyte antigen (e.g., B7-1, B7-2, B7-3) induces a T cell mediated immune response against the transfected tumor cell. Optionally, a gene encoding an antisense construct which blocks expression of an MHC class II associated protein, such as the invariant chain, can also be cotransfected with a DNA encoding a peptide having the activity of a B lymphocyte antigen to promote presentation of tumor associated antigens and induce tumor specific immunity. Thus, the induction of a T cell mediated immune response in a human subject may be sufficient to overcome tumor-specific tolerance in the subject.

[0191] The activity of a protein of the invention may, among other means, be measured by the following methods:

[0192] Suitable assays for thymocyte or splenocyte cytotoxicity include, without limitation, those described in: Current Protocols in Immunology, Ed by J. E. Coligan, A. M. Kruisbeek, D. H. Margulies, E. M. Shevach, W. Strober, Pub. Greene Publishing Associates and Wiley-Interscience (Chapter 3, In Vitro assays for Mouse Lymphocyte Function 3.1-3.19; Chapter 7, Immunologic studies in Humans); Herrmann et al., Proc. Natl. Acad. Sci. USA 78:2488-2492, 1981; Herrmann et al., J. Immunol. 128:1968-1974, 1982; Handa et al., J. Immunol. 135:1564-1572, 1985; Takai et al., I. Immunol. 137:3494-3500, 1986; Takai et al., J. Immunol. 140:508-512, 1988; Bowman et al., J. Virology 61:1992-1998; Bertagnolli et al., Cellular Immunology 133:327-341, 1991; Brown et al., J. Immunol. 153:3079-3092, 1994.

[0193] Assays for T-cell-dependent immunoglobulin responses and isotype switching (which will identify, among others, proteins that modulate T-cell dependent antibody responses and that affect Th1/Th2 profiles) include, without limitation, those described in: Maliszewski, J. Immunol. 144:3028-3033, 1990; and Assays for B cell function: In vitro antibody production, Mond, J. J. and Brunswick, M. In Current Protocols in Immunology. J. E. e.a. Coligan eds. Vol 1 pp.3.8.1-3.8.16, John Wiley and Sons, Toronto. 1994.

[0194] Mixed lymphocyte reaction (MLR) assays (which will identify, among others, proteins that generate predominantly Th1 and CTL responses) include, without limitation, those described in: Current Protocols in Immunology, Ed by J. E. Coligan, A. M. Kruisbeek, D. H. Margulies, E. M. Shevach, W. Strober, Pub. Greene Publishing Associates and Wiley-Interscience (Chapter 3, In Vitro assays for Mouse Lymphocyte Function 3.1-3.19; Chapter 7, Immunologic studies in Humans); Takai et al., J. Immunol. 137:3494-3500, 1986; Takai et al., J. Immunol. 140:508-512, 1988; Bertagnolli et al., J. Immunol. 149:3778-3783, 1992.

[0195] Dendritic cell-dependent assays (which will identify, among others, proteins expressed by dendritic cells that activate naive T-cells) include, without limitation, those described in: Guery et al., J. Immunol. 134:536-544, 1995; Inaba et al., Journal of Experimental Medicine 173:549-559, 1991; Macatonia et al., Journal of Immunology 154:5071-5079, 1995; Porgador et al., Journal of Experimental Medicine 182:255-260, 1995; Nair et al., Journal of Virology 67:4062-4069, 1993; Huang et al., Science 264:961-965, 1994; Macatonia et al., Journal of Experimental Medicine 169:1255-1264, 1989; Bhardwaj et al., Journal of Clinical Investigation 94:797-807, 1994; and Inaba et al., Journal of Experimental Medicine 172:631-640, 1990.

[0196] Assays for lymphocyte survival/apoptosis (which will identify, among others, proteins that prevent apoptosis after superantigen induction and proteins that regulate lymphocyte homeostasis) include, without limitation, those described in: Darzynkiewicz et al., Cytometry 13:795-808, 1992; Gorczyca et al., Leukemia 7:659-670, 1993; Gorczyca et al., Cancer Research 53:1945-1951, 1993; Itoh et al., Cell 66:233-243, 1991; Zacharchuk, Journal of Immunology 145:4037-4045, 1990; Zamai et al., Cytometry 14:891-897, 1993; Gorczyca et al., International Journal of Oncology 1:639-648, 1992.

[0197] Assays for proteins that influence early steps of T-cell commitment and development include, without limitation, those described in: Antica et al., Blood 84:111-117, 1994; Fine et al., Cellular Immunology 155:111-122, 1994; Galy et al., Blood 85:2770-2778, 1995; Toki et al., Proc. Nat. Acad Sci. USA 88:7548-7551, 1991.

### 4.10.8 Activin/Inhibin Activity

[0198] A polypeptide of the present invention may also exhibit activin- or inhibin-related activities. A polynucleotide of the invention may encode a polypeptide exhibiting such characteristics. Inhibins are characterized by their ability to inhibit the release of follicle stimulating hormone (FSH), while activins and are characterized by their ability to stimulate the release of follicle stimulating hormone (FSH). Thus, a polypeptide of the present invention, alone or in heterodimers with a member of the inhibin family, may be useful as a contraceptive based on the ability of inhibins to decrease fertility in female mammals and decrease spermatogenesis in male mammals. Administration of sufficient amounts of other inhibins can induce infertility in these mammals. Alternatively, the polypeptide of the invention, as a homodimer or as a heterodimer with other protein subunits of the inhibin group, may be useful as a fertility inducing therapeutic, based upon the ability of activin molecules in stimulating FSH release from cells of the anterior pituitary. See, for example, U.S. Pat. No. 4,798,885. A polypeptide of the invention may also be useful for advancement of the onset of fertility in sexually immature mammals, so as to increase the lifetime reproductive performance of domestic animals such as, but not limited to, cows, sheep and pigs.

[0199] The activity of a polypeptide of the invention may, among other means, be measured by the following methods.

[0200] Assays for activin/inhibin activity include, without limitation, those described in: Vale et al., Endocrinology 91:562-572, 1972; Ling et al., Nature 321:779-782, 1986; Vale et al., Nature 321:776-779, 1986; Mason et al., Nature 318:659-663, 1985; Forage et al., Proc. Natl. Acad. Sci. USA 83:3091-3095, 1986.

### 4.10.9 Chemotactic/Chemokinetic Activity

[0201] A polypeptide of the present invention may be involved in chemotactic or chemokinetic activity for mammalian cells, including, for example, monocytes, fibroblasts, neutrophils, T-cells, mast cells, eosinophils, epithelial and/or endothelial cells. A polynucleotide of the invention can encode a polypeptide exhibiting such attributes. Chemotactic and chemokinetic receptor activation can be used to mobilize or attract a desired cell population to a desired site of action. Chemotactic or chemokinetic compositions (e.g. proteins, antibodies, binding partners, or modulators of the invention) provide particular advantages in treatment of wounds and other trauma to tissues, as well as in treatment of localized infections. For example, attraction of lymphocytes, monocytes or neutrophils to tumors or sites of infection may result in improved immune responses against the tumor or infecting agent.

[0202] A protein or peptide has chemotactic activity for a particular cell population if it can stimulate, directly or indirectly, the directed orientation or movement of such cell population. Preferably, the protein or peptide has the ability to directly stimulate directed movement of cells. Whether a particular protein has chemotactic activity for a population of cells can be readily determined by employing such protein or peptide in any known assay for cell chemotaxis.

[0203] Therapeutic compositions of the invention can be used in the following:

[0204] Assays for chemotactic activity (which will identify proteins that induce or prevent chemotaxis) consist of assays that measure the ability of a protein to induce the migration of cells across a membrane as well as the ability of a protein to induce the adhesion of one cell population to another cell population. Suitable assays for movement and adhesion include, without limitation, those described in: Current Protocols in Immunology, Ed by J. E. Coligan, A. M. Kruisbeek, D. H. Marguiles. E. M. Shevach, W. Strober, Pub. Greene Publishing Associates and Wiley-Interscience (Chapter 6.12, Measurement of alpha and beta Chemokines 6.12.1-6.12.28; Taub et al. J. Clin. Invest. 95:1370-1376, 1995; Lind et al. APMIS 103:140-146, 1995; Muller et al Eur. J. Immunol. 25:1744-1748; Gruber et al. J. of Immunol. 152:5860-5867, 1994; Johnston et al. J. of Immunol. 153:1762-1768, 1994.

### 4.10.10 Hemostatic and Thrombolytic Activity

[0205] A polypeptide of the invention may also be involved in hemostatis or thrombolysis or thrombosis. A polynucleotide of the invention can encode a polypeptide exhibiting such attributes. Compositions may be useful in treatment of various coagulation disorders (including hereditary disorders, such as hemophilias) or to enhance coagulation and other hemostatic events in treating wounds resulting from trauma, surgery or other causes. A composition of the invention may also be useful for dissolving or inhibiting formation of thromboses and for treatment and prevention of conditions resulting therefrom (such as, for example, infarction of cardiac and central nervous system vessels (e.g., stroke).

[0206] Therapeutic compositions of the invention can be used in the following:

[0207] Assay for hemostatic and thrombolytic activity include, without limitation, those described in: Linet et al., J. Clin. Pharmacol. 26:131-140, 1986; Burdick et al., Thrombosis Res. 45:413-419, 1987; Humphrey et al., Fibrinolysis 5:71-79 (1991); Schaub, Prostaglandins 35:467-474, 1988.

### 4.10.11 Cancer Diagnosis and Therapy

[0208] Polypeptides of the invention may be involved in cancer cell generation, proliferation or metastasis. Detection of the presence or amount of polynucleotides or polypeptides of the invention may be useful for the diagnosis and/or prognosis of one or more types of cancer. For example, the presence or increased expression of a polynucleotide/polypeptide of the invention may indicate a hereditary risk of cancer, a precancerous condition, or an ongoing malignancy. Conversely, a defect in the gene or absence of the polypeptide may be associated with a cancer condition. Identification of single nucleotide polymorphisms associated with cancer or a predisposition to cancer may also be useful for diagnosis or prognosis.

[0209] Cancer treatments promote tumor regression by inhibiting tumor cell proliferation, inhibiting angiogenesis (growth of new blood vessels that is necessary to support tumor growth) and/or prohibiting metastasis by reducing tumor cell motility or invasiveness. Therapeutic compositions of the invention may be effective in adult and pediatric oncology including in solid phase tumors/malignancies, locally advanced tumors, human soft tissue sarcomas, metastatic cancer, including lymphatic metastases, blood cell malignancies including multiple myeloma, acute and chronic leukemias, and lymphomas, head and neck cancers including mouth cancer, larynx cancer and thyroid cancer, lung cancers including small cell carcinoma and non-small cell cancers, breast cancers including small cell carcinoma and ductal carcinoma, gastrointestinal cancers including esophageal cancer, stomach cancer, colon cancer, colorectal cancer and polyps associated with colorectal neoplasia, pancreatic cancers, liver cancer, urologic cancers including bladder cancer and prostate cancer, malignancies of the female genital tract including ovarian carcinoma, uterine (including endometrial) cancers, and solid tumor in the ovarian follicle, kidney cancers including renal cell carcinoma, brain cancers including intrinsic brain tumors, neuroblastoma, astrocytic brain tumors, gliomas, metastatic tumor cell invasion in the central nervous system, bone cancers including osteomas, skin cancers including malignant melanoma, tumor progression of human skin keratinocytes, squamous cell carcinoma, basal cell carcinoma, hemangiopericytoma and Karposi's sarcoma

[0210] Polypeptides, polynucleotides, or modulators of polypeptides of the invention (including inhibitors and stimulators of the biological activity of the polypeptide of the invention) may be administered to treat cancer. Therapeutic compositions can be administered in therapeutically effective dosages alone or in combination with adjuvant cancer therapy such as surgery, chemotherapy, radiotherapy, thermotherapy, and laser therapy, and may provide a beneficial effect, e.g. reducing tumor size, slowing rate of tumor growth, inhibiting metastasis, or otherwise improving overall clinical condition, without necessarily eradicating the cancer.

[0211] The composition can also be administered in therapeutically effective amounts as a portion of an anti-cancer cocktail. An anti-cancer cocktail is a mixture of the polypeptide or modulator of the invention with one or more anti-cancer drugs in addition to a pharmaceutically acceptable carrier for delivery. The use of anti-cancer cocktails as a cancer treatment is routine. Anti-cancer drugs that are well known in the art and can be used as a treatment in combination with the polypeptide or modulator of the invention include: Actinomycin D, Aminoglutethimide, Asparaginase, Bleomycin, Busulfan, Carboplatin, Carmustine, Chlorambucil, Cisplatin (cis-DDP), Cyclophosphamide, Cytarabine HCl (Cytosine arabinoside), Dacarbazine, Dactinomycin, Daunorubicin HCl, Doxorubicin HCl, Estramustine phosphate sodium, Etoposide (V16-213), Floxuridine, 5-Fluorouracil (5-Fu), Flutamide, Hydroxyurea (hydroxycarbamide), Ifosfamide, Interferon Alpha-2a, Interferon Alpha-2b, Leuprolide acetate (LHRH-releasing factor analog), Lomustine, Mechlorethamine HCl (nitrogen mustard), Melphalan, Mercaptopurine, Mesna, Methotrexate (MTX), Mitomycin, Mitoxantrone HCl, Octreotide, Plicamycin, Procarbazine HCl, Streptozocin, Tamoxifen citrate, Thioguanine, Thiotepa, Vinblastine sulfate, Vincristine sulfate, Amsacrine, Azacitidine, Hexamethylmelamine, Interleukin-2, Mitoguazone, Pentostatin, Semustine, Teniposide, and Vindesine sulfate.

[0212] In addition, therapeutic compositions of the invention may be used for prophylactic treatment of cancer. There are hereditary conditions and/or environmental situations (e.g. exposure to carcinogens) known in the art that predispose an individual to developing cancers. Under these circumstances, it may be beneficial to treat these individuals with therapeutically effective doses of the polypeptide of the invention to reduce the risk of developing cancers.

[0213] In vitro models can be used to determine the effective doses of the polypeptide of the invention as a potential cancer treatment. These in vitro models include proliferation assays of cultured tumor cells, growth of cultured tumor cells in soft agar (see Freshney, (1987) Culture of Animal Cells: A Manual of Basic Technique, Wily-Liss, New York, N.Y. Ch 18 and Ch 21), tumor systems in nude mice as described in Giovanella et al., J. Natl. Can. Inst., 52: 921-30 (1974), mobility and invasive potential of tumor cells in Boyden Chamber assays as described in Pilkington et al., Anticancer Res., 17: 4107-9 (1997), and angiogenesis assays such as induction of vascularization of the chick chorioallantoic membrane or induction of vascular endothelial cell migration as described in Ribatta et al., Intl. J. Dev. Biol., 40: 1189-97 (1999) and Li et al., Clin. Exp. Metastasis, 17:423-9 (1999), respectively. Suitable tumor cells lines are available, e.g. from American Type Tissue Culture Collection catalogs.

### 4.10.12 Receptor/Ligand Activity

[0214] A polypeptide of the present invention may also demonstrate activity as receptor, receptor ligand or inhibitor or agonist of receptor/ligand interactions. A polynucleotide of the invention can encode a polypeptide exhibiting such characteristics. Examples of such receptors and ligands include, without limitation, cytokine receptors and their ligands, receptor kinases and their ligands, receptor phosphatases and their ligands, receptors involved in cell-cell interactions and their ligands (including without limitation, cellular adhesion molecules (such as selectins, integrins and their ligands) and receptor/ligand pairs involved in antigen presentation, antigen recognition and development of cellular and humoral immune responses. Receptors and ligands are also useful for screening of potential peptide or small molecule inhibitors of the relevant receptor/ligand interaction. A protein of the present invention (including, without limitation, fragments of receptors and ligands) may themselves be useful as inhibitors of receptor/ligand interactions.

[0215] The activity of a polypeptide of the invention may, among other means, be measured by the following methods:

[0216] Suitable assays for receptor-ligand activity include without limitation those described in: Current Protocols in Immunology, Ed by J. E. Coligan, A. M. Kruisbeek, D. H. Margulies, E. M. Shevach, W. Strober, Pub. Greene Publishing Associates and Wiley-Interscience (Chapter 7.28, Measurement of Cellular Adhesion under static conditions 7.28.1-7.28.22), Takai et al., Proc. Natl. Acad. Sci. USA 84:6864-6868, 1987; Bierer et al., J. Exp. Med. 168:1145-1156, 1988; Rosenstein et al., J. Exp. Med. 169:149-160 1989; Stoltenborg et al., J. Immunol. Methods 175:59-68, 1994; Stitt et al., Cell 80:661-670, 1995.

[0217] By way of example, the polypeptides of the invention may be used as a receptor for a ligand(s) thereby transmitting the biological activity of that ligand(s). Ligands may be identified through binding assays, affinity chromatography, dihybrid screening assays, BIAcore assays, gel overlay assays, or other methods known in the art.

[0218] Studies characterizing drugs or proteins as agonist or antagonist or partial agonists or a partial antagonist require the use of other proteins as competing ligands. The polypeptides of the present invention or ligand(s) thereof may be labeled by being coupled to radioisotopes, colorimetric molecules or a toxin molecules by conventional methods. (“Guide to Protein Purification” Murray P. Deutscher (ed) Methods in Enzymology Vol. 182 (1990) Academic Press, Inc. San Diego). Examples of radioisotopes include, but are not limited to, tritium and carbon-14. Examples of calorimetric molecules include, but are not limited to, fluorescent molecules such as fluorescamine, or rhodamine or other colorimetric molecules. Examples of toxins include, but are not limited, to ricin.

### 4.10.13 Drug Screening

[0219] This invention is particularly useful for screening chemical compounds by using the novel polypeptides or binding fragments thereof in any of a variety of drug screening techniques. The polypeptides or fragments employed in such a test may either be free in solution, affixed to a solid support, borne on a cell surface or located intracellularly. One method of drug screening utilizes eukaryotic or prokaryotic host cells which are stably transformed with recombinant nucleic acids expressing the polypeptide or a fragment thereof. Drugs are screened against such transformed cells in competitive binding assays. Such cells, either in viable or fixed form, can be used for standard binding assays. One may measure, for example, the formation of complexes between polypeptides of the invention or fragments and the agent being tested or examine the diminution in complex formation between the novel polypeptides and an appropriate cell line, which are well known in the art.

[0220] Sources for test compounds that may be screened for ability to bind to or modulate (i.e., increase or decrease) the activity of polypeptides of the invention include (1) inorganic and organic chemical libraries, (2) natural product libraries, and (3) combinatorial libraries comprised of either random or mimetic peptides, oligonucleotides or organic molecules.

[0221] Chemical libraries may be readily synthesized or purchased from a number of commercial sources, and may include structural analogs of known compounds or compounds that are identified as “hits” or “leads” via natural product screening.

[0222] The sources of natural product libraries are microorganisms (including bacteria and fungi), animals, plants or other vegetation, or marine organisms, and libraries of mixtures for screening may be created by: (1) fermentation and extraction of broths from soil, plant or marine microorganisms or (2) extraction of the organisms themselves. Natural product libraries include polyketides, non-ribosomal peptides, and (non-naturally occurring) variants thereof. For a review, see Science 282:63-68 (1998).

[0223] Combinatorial libraries are composed of large numbers of peptides, oligonucleotides or organic compounds and can be readily prepared by traditional automated synthesis methods, PCR, cloning or proprietary synthetic methods. Of particular interest are peptide and oligonucleotide combinatorial libraries. Still other libraries of interest include peptide, protein, peptidomimetic, multiparallel synthetic collection, recombinatorial, and polypeptide libraries. For a review of combinatorial chemistry and libraries created therefrom, see Myers, Curr. Opin. Biotechnol. 8:701-707 (1997). For reviews and examples of peptidomimetic libraries, see Al-Obeidi et al., Mol. Biotechnol, 9(3):205-23 (1998); Hruby et al., Curr Opin Chem Biol, 1(1):114-19 (1997); Dorner et al., Bioorg Med Chem, 4(5):709-15 (1996) (alkylated dipeptides).

[0224] Identification of modulators through use of the various libraries described herein permits modification of the candidate “hit” (or “lead”) to optimize the capacity of the “hit” to bind a polypeptide of the invention. The molecules identified in the binding assay are then tested for antagonist or agonist activity in in vivo tissue culture or animal models that are well known in the art. In brief, the molecules are titrated into a plurality of cell cultures or animals and then tested for either cell/animal death or prolonged survival of the animal/cells.

[0225] The binding molecules thus identified may be complexed with toxins, e.g., ricin or cholera, or with other compounds that are toxic to cells such as radioisotopes. The toxin-binding molecule complex is then targeted to a tumor or other cell by the specificity of the binding molecule for a polypeptide of the invention. Alternatively, the binding molecules may be complexed with imaging agents for targeting and imaging purposes.

### 4.10.14 Assay for Receptor Activity

[0226] The invention also provides methods to detect specific binding of a polypeptide e.g. a ligand or a receptor. The art provides numerous assays particularly useful for identifying previously unknown binding partners for receptor polypeptides of the invention. For example, expression cloning using mammalian or bacterial cells, or dihybrid screening assays can be used to identify polynucleotides encoding binding partners. As another example, affinity chromatography with the appropriate immobilized polypeptide of the invention can be used to isolate polypeptides that recognize and bind polypeptides of the invention. There are a number of different libraries used for the identification of compounds, and in particular small molecules, that modulate (i.e., increase or decrease) biological activity of a polypeptide of the invention. Ligands for receptor polypeptides of the invention can also be identified by adding exogenous ligands, or cocktails of ligands to two cells populations that are genetically identical except for the expression of the receptor of the invention: one cell population expresses the receptor of the invention whereas the other does not. The response of the two cell populations to the addition of ligands(s) are then compared. Alternatively, an expression library can be co-expressed with the polypeptide of the invention in cells and assayed for an autocrine response to identify potential ligand(s). As still another example, BIAcore assays, gel overlay assays, or other methods known in the art can be used to identify binding partner polypeptides, including, (1) organic and inorganic chemical libraries, (2) natural product libraries, and (3) combinatorial libraries comprised of random peptides, oligonucleotides or organic molecules.

[0227] The role of downstream intracellular signaling molecules in the signaling cascade of the polypeptide of the invention can be determined. For example, a chimeric protein in which the cytoplasmic domain of the polypeptide of the invention is fused to the extracellular portion of a protein, whose ligand has been identified, is produced in a host cell. The cell is then incubated with the ligand specific for the extracellular portion of the chimeric protein, thereby activating the chimeric receptor. Known downstream proteins involved in intracellular signaling can then be assayed for expected modifications i.e. phosphorylation. Other methods known to those in the art can also be used to identify signaling molecules involved in receptor activity.

### 4.10.15 Anti-Inflammatory Activity

[0228] Compositions of the present invention may also exhibit anti-inflammatory activity. The anti-inflammatory activity may be achieved by providing a stimulus to cells involved in the inflammatory response, by inhibiting or promoting cell-cell interactions (such as, for example, cell adhesion), by inhibiting or promoting chemotaxis of cells involved in the inflammatory process, inhibiting or promoting cell extravasation, or by stimulating or suppressing production of other factors which more directly inhibit or promote an inflammatory response. Compositions with such activities can be used to treat inflammatory conditions including chronic or acute conditions), including without limitation intimation associated with infection (such as septic shock, sepsis or systemic inflammatory response syndrome (SIRS)), ischemia-reperfusion injury, endotoxin lethality, arthritis, complement-mediated hyperacute rejection, nephritis, cytokine or chemokine-induced lung injury, inflammatory bowel disease, Crohn's disease or resulting from over production of cytokines such as TNF or IL-1. Compositions of the invention may also be useful to treat anaphylaxis and hypersensitivity to an antigenic substance or material. Compositions of this invention may be utilized to prevent or treat conditions such as, but not limited to, sepsis, acute pancreatitis, endotoxin shock, cytokine induced shock, rheumatoid arthritis, chronic inflammatory arthritis, pancreatic cell damage from diabetes mellitus type 1, graft versus host disease, inflammatory bowel disease, inflamation associated with pulmonary disease, other autoimmune disease or inflammatory disease, an antiproliferative agent such as for acute or chronic mylegenous leukemia or in the prevention of premature labor secondary to intrauterine infections.

### 4.10.16 Leukemias

[0229] Leukemias and related disorders may be treated or prevented by administration of a therapeutic that promotes or inhibits function of the polynucleotides and/or polypeptides of the invention. Such leukemias and related disorders include but are not limited to acute leukemia, acute lymphocytic leukemia, acute myelocytic leukemia, myeloblastic, promyelocytic, myelomonocytic, monocytic, erythroleukemia, chronic leukemia, chronic myelocytic (granulocytic) leukemia and chronic lymphocytic leukemia (for a review of such disorders, see Fishman et al., 1985, Medicine, 2d Ed., J. B. Lippincott Co., Pa.).

### 4.10.17 Nervous System Disorders

[0230] Nervous system disorders, involving cell types which can be tested for efficacy of intervention with compounds that modulate the activity of the polynucleotides and/or polypeptides of the invention, and which can be treated upon thus observing an indication of therapeutic utility, include but are not limited to nervous system injuries, and diseases or disorders which result in either a disconnection of axons, a diminution or degeneration of neurons, or demyelination. Nervous system lesions which may be treated in a patient (including human and non-human mammalian patients) according to the invention include but are not limited to the following lesions of either the central (including spinal cord, brain) or peripheral nervous systems:

[0231] (i) traumatic lesions, including lesions caused by physical injury or associated with surgery, for example, lesions which sever a portion of the nervous system, or compression injuries;

[0232] (ii) ischemic lesions, in which a lack of oxygen in a portion of the nervous system results in neuronal injury or death, including cerebral infarction or ischemia, or spinal cord infarction or ischemia;

[0233] (iii) infectious lesions, in which a portion of the nervous system is destroyed or injured as a result of infection, for example, by an abscess or associated with infection by human immunodeficiency virus, herpes zoster, or herpes simplex virus or with Lyme disease, tuberculosis, syphilis;

[0234] (iv) degenerative lesions, in which a portion of the nervous system is destroyed or injured as a result of a degenerative process including but not limited to degeneration associated with Parkinson's disease, Alzheimer's disease, Huntington's chorea, or amyotrophic lateral sclerosis;

[0235] (v) lesions associated with nutritional diseases or disorders, in which a portion of the nervous system is destroyed or injured by a nutritional disorder or disorder of metabolism including but not limited to, vitamin B 12 deficiency, folic acid deficiency, Wernicke disease, tobacco-alcohol amblyopia, Marchiafava-Bignami disease (primary degeneration of the corpus callosum), and alcoholic cerebellar degeneration;

[0236] (vi) neurological lesions associated with systemic diseases including but not limited to diabetes (diabetic neuropathy, Bell's palsy), systemic lupus erythematosus, carcinoma, or sarcoidosis;

[0237] (vii) lesions caused by toxic substances including alcohol, lead, or particular neurotoxins; and

[0238] (viii) demyelinated lesions in which a portion of the nervous system is destroyed or injured by a demyelinating disease including but not limited to multiple sclerosis, human immunodeficiency virus-associated myelopathy, transverse myelopathy or various etiologies, progressive multifocal leukoencephalopathy, and central pontine myelinolysis.

[0239] Therapeutics which are useful according to the invention for treatment of a nervous system disorder may be selected by testing for biological activity in promoting the survival or differentiation of neurons. For example, and not by way of limitation, therapeutics which elicit any of the following effects may be useful according to the invention:

[0240] (i) increased survival time of neurons in culture;

[0241] (ii) increased sprouting of neurons in culture or in vivo;

[0242] (iii) increased production of a neuron-associated molecule in culture or in vivo, e.g., choline acetyltransferase or acetylcholinesterase with respect to motor neurons; or

[0243] (iv) decreased symptoms of neuron dysfunction in vivo.

[0244] Such effects may be measured by any method known in the art. In preferred, non-limiting embodiments, increased survival of neurons may be measured by the method set forth in Arakawa et al. (1990, J. Neurosci. 10:3507-3515); increased sprouting of neurons may be detected by methods set forth in Pestronk et al. (1980, Exp. Neurol. 70:65-82) or Brown et al. (1981, Ann. Rev. Neurosci. 4:17-42); increased production of neuron-associated molecules may be measured by bioassay, enzymatic assay, antibody binding, Northern blot assay, etc., depending on the molecule to be measured; and motor neuron dysfunction may be measured by assessing the physical manifestation of motor neuron disorder, e.g., weakness, motor neuron conduction velocity, or functional disability.

[0245] In specific embodiments, motor neuron disorders that may be treated according to the invention include but are not limited to disorders such as infarction, infection, exposure to toxin, trauma, surgical damage, degenerative disease or malignancy that may affect motor neurons as well as other components of the nervous system, as well as disorders that selectively affect neurons such as amyotrophic lateral sclerosis, and including but not limited to progressive spinal muscular atrophy, progressive bulbar palsy, primary lateral sclerosis, infantile and juvenile muscular atrophy, progressive bulbar paralysis of childhood (Fazio-Londe syndrome), poliomyelitis and the post polio syndrome, and Hereditary Motorsensory Neuropathy (Charcot-Marie-Tooth Disease).

### 4.10.18 Other Activities

[0246] A polypeptide of the invention may also exhibit one or more of the following additional activities or effects: inhibiting the growth, infection or function of, or killing, infectious agents, including, without limitation, bacteria, viruses, fungi and other parasites; effecting (suppressing or enhancing) bodily characteristics, including, without limitation, height, weight, hair color, eye color, skin, fat to lean ratio or other tissue pigmentation, or organ or body part size or shape (such as, for example, breast augmentation or diminution, change in bone form or shape); effecting biorhythms or circadian cycles or rhythms; effecting the fertility of male or female subjects; effecting the metabolism, catabolism, anabolism, processing, utilization, storage or elimination of dietary fat, lipid, protein, carbohydrate, vitamins, minerals, co-factors or other nutritional factors or component(s); effecting behavioral characteristics, including, without limitation, appetite, libido, stress, cognition (including cognitive disorders), depression (including depressive disorders) and violent behaviors; providing analgesic effects or other pain reducing effects; promoting differentiation and growth of embryonic stem cells in lineages other than hematopoietic lineages; hormonal or endocrine activity; in the case of enzymes, correcting deficiencies of the enzyme and treating deficiency-related diseases; treatment of hyperproliferative disorders (such as, for example, psoriasis); immunoglobulin-like activity (such as, for example, the ability to bind antigens or complement); and the ability to act as an antigen in a vaccine composition to raise an immune response against such protein or another material or entity which is cross-reactive with such protein.

### 4.10.19 Identification of Polymorphisms

[0247] The demonstration of polymorphisms makes possible the identification of such polymorphisms in human subjects and the pharmacogenetic use of this information for diagnosis and treatment. Such polymorphisms may be associated with, e.g., differential predisposition or susceptibility to various disease states (such as disorders involving inflammation or immune response) or a differential response to drug administration, and this genetic information can be used to tailor preventive or therapeutic treatment appropriately. For example, the existence of a polymorphism associated with a predisposition to inflammation or autoimmune disease makes possible the diagnosis of this condition in humans by identifying the presence of the polymorphism.

[0248] Polymorphisms can be identified in a variety of ways known in the art which all generally involve obtaining a sample from a patient, analyzing DNA from the sample, optionally involving isolation or amplification of the DNA, and identifying the presence of the polymorphism in the DNA. For example, PCR may be used to amplify an appropriate fragment of genomic DNA which may then be sequenced. Alternatively, the DNA may be subjected to allele-specific oligonucleotide hybridization (in which appropriate oligonucleotides are hybridized to the DNA under conditions permitting detection of a single base mismatch) or to a single nucleotide extension assay (in which an oligonucleotide that hybridizes immediately adjacent to the position of the polymorphism is extended with one or more labeled nucleotides). In addition, traditional restriction fragment length polymorphism analysis (using restriction enzymes that provide differential digestion of the genomic DNA depending on the presence or absence of the polymorphism) may be performed. Arrays with nucleotide sequences of the present invention can be used to detect polymorphisms. The array can comprise modified nucleotide sequences of the present invention in order to detect the nucleotide sequences of the present invention. In the alternative, any one of the nucleotide sequences of the present invention can be placed on the array to detect changes from those sequences.

[0249] Alternatively a polymorphism resulting in a change in the amino acid sequence could also be detected by detecting a corresponding change in amino acid sequence of the protein, e.g., by an antibody specific to the variant sequence.

### 4.10.20 Arthritis and Inflammation

[0250] The immunosuppressive effects of the compositions of the invention against rheumatoid arthritis is determined in an experimental animal model system. The experimental model system is adjuvant induced arthritis in rats, and the protocol is described by J. Holoshitz, et at., 1983, Science, 219:56, or by B. Waksman et al., 1963, Int. Arch. Allergy Appl. Immunol., 23:129. Induction of the disease can be caused by a single injection, generally intradermally, of a suspension of killed Mycobacterium tuberculosis in complete Freund's adjuvant (CFA). The route of injection can vary, but rats may be injected at the base of the tail with an adjuvant mixture. The polypeptide is administered in phosphate buffered solution (PBS) at a dose of about 1-5 mg/kg. The control consists of administering PBS only.

[0251] The procedure for testing the effects of the test compound would consist of intradermally injecting killed Mycobacterium tuberculosis in CFA followed by immediately administering the test compound and subsequent treatment every other day until day 24. At 14, 15, 18, 20, 22, and 24 days after injection of Mycobacterium CFA, an overall arthritis score may be obtained as described by J. Holoskitz above. An analysis of the data would reveal that the test compound would have a dramatic affect on the swelling of the joints as measured by a decrease of the arthritis score.

### 4.11 Therapeutic Methods

[0252] The compositions (including polypeptide fragments, analogs, variants and antibodies or other binding partners or modulators including antisense polynucleotides) of the invention have numerous applications in a variety of therapeutic methods. Examples of therapeutic applications include, but are not limited to, those exemplified herein.

### 4.11.1 Example

[0253] One embodiment of the invention is the administration of an effective amount of the polypeptides or other composition of the invention to individuals affected by a disease or disorder that can be modulated by regulating the peptides of the invention. While the mode of administration is not particularly important, parenteral administration is preferred. An exemplary mode of administration is to deliver an intravenous bolus. The dosage of the polypeptides or other composition of the invention will normally be determined by the prescribing physician. It is to be expected that the dosage will vary according to the age, weight, condition and response of the individual patient. Typically, the amount of polypeptide administered per dose will be in the range of about 0.01 μg/kg to 100 mg/kg of body weight, with the preferred dose being about 0.1 μg/kg to 10 mg/kg of patient body weight. For parenteral administration, polypeptides of the invention will be formulated in an injectable form combined with a pharmaceutically acceptable parenteral vehicle. Such vehicles are well known in the art and examples include water, saline, Ringer's solution, dextrose solution, and solutions consisting of small amounts of the human serum albumin. The vehicle may contain minor amounts of additives that maintain the isotonicity and stability of the polypeptide or other active ingredient. The preparation of such solutions is within the skill of the art.

### 4.12 Pharmaceutical Formulations and Routes of Administration

[0254] A protein or other composition of the present invention (from whatever source derived, including without limitation from recombinant and non-recombinant sources and including antibodies and other binding partners of the polypeptides of the invention) may be administered to a patient in need, by itself, or in pharmaceutical compositions where it is mixed with suitable carriers or excipient(s) at doses to treat or ameliorate a variety of disorders. Such a composition may optionally contain (in addition to protein or other active ingredient and a carrier) diluents, fillers, salts, buffers, stabilizers, solubilizers, and other materials well known in the art. The term “pharmaceutically acceptable” means a non-toxic material that does not interfere with the effectiveness of the biological activity of the active ingredient(s). The characteristics of the carrier will depend on the route of administration. The pharmaceutical composition of the invention may also contain cytokines, lymphokines, or other hematopoietic factors such as M-CSF, GM-CSF, TNF, IL-1, IL-2, IL-3, IL-4, IL-5, IL-6, IL-7, IL-8, IL-9, IL-10, IL-11, IL-12, IL-13, IL-14, IL-15, IFN, TNF0, TNF1, TNF2, G-CSF, Meg-CSF, thrombopoietin, stem cell factor, and erythropoietin. In further compositions, proteins of the invention may be combined with other agents beneficial to the treatment of the disease or disorder in question. These agents include various growth factors such as epidermal growth factor (EGF), platelet-derived growth factor (PDGF), transforming growth factors (TGF-α and TGF-β), insulin-like growth factor (IGF), as well as cytokines described herein.

[0255] The pharmaceutical composition may further contain other agents which either enhance the activity of the protein or other active ingredient or complement its activity or use in treatment. Such additional factors and/or agents may be included in the pharmaceutical composition to produce a synergistic effect with protein or other active ingredient of the invention, or to minimize side effects. Conversely, protein or other active ingredient of the present invention may be included in formulations of the particular clotting factor, cytokine, lymphokine, other hematopoietic factor, thrombolytic or anti-thrombotic factor, or anti-inflammatory agent to minimize side effects of the clotting factor, cytokine, lymphokine, other hematopoietic factor, thrombolytic or anti-thrombotic factor, or anti-inflammatory agent (such as IL-1Ra, IL-1 Hy1, IL-1 Hy2, anti-TNF, corticosteroids, immunosuppressive agents). A protein of the present invention may be active in multimers (e.g., heterodimers or homodimers) or complexes with itself or other proteins. As a result, pharmaceutical compositions of the invention may comprise a protein of the invention in such multimeric or complexed form.

[0256] As an alternative to being included in a pharmaceutical composition of the invention including a first protein, a second protein or a therapeutic agent may be concurrently administered with the first protein (e.g., at the same time, or at differing times provided that therapeutic concentrations of the combination of agents is achieved at the treatment site). Techniques for formulation and administration of the compounds of the instant application may be found in “Remington's Pharmaceutical Sciences,” Mack Publishing Co., Easton, Pa., latest edition. A therapeutically effective dose further refers to that amount of the compound sufficient to result in amelioration of symptoms, e.g., treatment, healing, prevention or amelioration of the relevant medical condition, or an increase in rate of treatment, healing, prevention or amelioration of such conditions. When applied to an individual active ingredient, administered alone, a therapeutically effective dose refers to that ingredient alone. When applied to a combination, a therapeutically effective dose refers to combined amounts of the active ingredients that result in the therapeutic effect, whether administered in combination, serially or simultaneously.

[0257] In practicing the method of treatment or use of the present invention, a therapeutically effective amount of protein or other active ingredient of the present invention is administered to a mammal having a condition to be treated. Protein or other active ingredient of the present invention may be administered in accordance with the method of the invention either alone or in combination with other therapies such as treatments employing cytokines, lymphokines or other hematopoietic factors. When co-administered with one or more cytokines, lymphokines or other hematopoietic factors, protein or other active ingredient of the present invention may be administered either simultaneously with the cytokine(s), lymphokine(s), other hematopoietic factor(s), thrombolytic or anti-thrombotic factors, or sequentially. If administered sequentially, the attending physician will decide on the appropriate sequence of administering protein or other active ingredient of the present invention in combination with cytokine(s), lymphokine(s), other hematopoietic factor(s), thrombolytic or anti-thrombotic factors.

### 4.12.1 Routes of Administration

[0258] Suitable routes of administration may, for example, include oral, rectal, transmucosal, or intestinal administration; parenteral delivery, including intramuscular, subcutaneous, intramedullary injections, as well as intrathecal, direct intraventricular, intravenous, intraperitoneal, intranasal, or intraocular injections. Administration of protein or other active ingredient of the present invention used in the pharmaceutical composition or to practice the method of the present invention can be carried out in a variety of conventional ways, such as oral ingestion, inhalation, topical application or cutaneous, subcutaneous, intraperitoneal, parenteral or intravenous injection. Intravenous administration to the patient is preferred.

[0259] Alternately, one may administer the compound in a local rather than systemic manner, for example, via injection of the compound directly into a arthritic joints or in fibrotic tissue, often in a depot or sustained release formulation. In order to prevent the scarring process frequently occurring as complication of glaucoma surgery, the compounds may be administered topically, for example, as eye drops. Furthermore, one may administer the drug in a targeted drug delivery system, for example, in a liposome coated with a specific antibody, targeting, for example, arthritic or fibrotic tissue. The liposomes will be targeted to and taken up selectively by the afflicted tissue.

[0260] The polypeptides of the invention are administered by any route that delivers an effective dosage to the desired site of action. The determination of a suitable route of administration and an effective dosage for a particular indication is within the level of skill in the art. Preferably for wound treatment, one administers the therapeutic compound directly to the site. Suitable dosage ranges for the polypeptides of the invention can be extrapolated from these dosages or from similar studies in appropriate animal models. Dosages can then be adjusted as necessary by the clinician to provide maximal therapeutic benefit.

### 4.12.2 Compositions/Formulations

[0261] Pharmaceutical compositions for use in accordance with the present invention thus may be formulated in a conventional manner using one or more physiologically acceptable carriers comprising excipients and auxiliaries which facilitate processing of the active compounds into preparations which can be used pharmaceutically. These pharmaceutical compositions may be manufactured in a manner that is itself known. e.g., by means of conventional mixing, dissolving, granulating, dragee-making, levigating, emulsifying, encapsulating, entrapping or lyophilizing processes. Proper formulation is dependent upon the route of administration chosen. When a therapeutically effective amount of protein or other active ingredient of the present invention is administered orally, protein or other active ingredient of the present invention will be in the form of a tablet, capsule, powder, solution or elixir. When administered in tablet form, the pharmaceutical composition of the invention may additionally contain a solid carrier such as a gelatin or an adjuvant. The tablet, capsule, and powder contain from about 5 to 95% protein or other active ingredient of the present invention, and preferably from about 25 to 90% protein or other active ingredient of the present invention. When administered in liquid form, a liquid carrier such as water, petroleum, oils of animal or plant origin such as peanut oil, mineral oil, soybean oil, or sesame oil, or synthetic oils may be added. The liquid form of the pharmaceutical composition may further contain physiological saline solution, dextrose or other saccharide solution, or glycols such as ethylene glycol, propylene glycol or polyethylene glycol. When administered in liquid form, the pharmaceutical composition contains from about 0.5 to 90% by weight of protein or other active ingredient of the present invention, and preferably from about 1 to 50% protein or other active ingredient of the present invention.

[0262] When a therapeutically effective amount of protein or other active ingredient of the present invention is administered by intravenous, cutaneous or subcutaneous injection, protein or other active ingredient of the present invention will be in the form of a pyrogen-free, parenterally acceptable aqueous solution. The preparation of such parenterally acceptable protein or other active ingredient solutions, having due regard to pH, isotonicity, stability, and the like, is within the skill in the art. A preferred pharmaceutical composition for intravenous, cutaneous, or subcutaneous injection should contain, in addition to protein or other active ingredient of the present invention, an isotonic vehicle such as Sodium Chloride Injection, Ringer's Injection, Dextrose Injection, Dextrose and Sodium Chloride Injection, Lactated Ringer's Injection, or other vehicle as known in the art. The pharmaceutical composition of the present invention may also contain stabilizers, preservatives, buffers, antioxidants, or other additives known to those of skill in the art. For injection, the agents of the invention may be formulated in aqueous solutions, preferably in physiologically compatible buffers such as Hanks's solution, Ringer's solution, or physiological saline buffer. For transmucosal administration, penetrants appropriate to the barrier to be permeated are used in the formulation. Such penetrants are generally known in the art.

[0263] For oral administration, the compounds can be formulated readily by combining the active compounds with pharmaceutically acceptable carriers well known in the art. Such carriers enable the compounds of the invention to be formulated as tablets, pills, dragees, capsules, liquids, gels, syrups, slurries, suspensions and the like, for oral ingestion by a patient to be treated. Pharmaceutical preparations for oral use can be obtained from a solid excipient, optionally grinding a resulting mixture, and processing the mixture of granules, after adding suitable auxiliaries, if desired, to obtain tablets or dragee cores. Suitable excipients are, in particular, fillers such as sugars, including lactose, sucrose, mannitol, or sorbitol; cellulose preparations such as, for example, maize starch, wheat starch, rice starch, potato starch, gelatin, gum tragacanth, methyl cellulose, hydroxypropylmethyl-cellulose, sodium carboxymethylcellulose, and/or polyvinylpyrrolidone (PVP). If desired, disintegrating agents may be added, such as the cross-linked polyvinyl pyrrolidone, agar, or alginic acid or a salt thereof such as sodium alginate. Dragee cores are provided with suitable coatings. For this purpose, concentrated sugar solutions may be used, which may optionally contain gum arabic, talc, polyvinyl pyrrolidone, carbopol gel, polyethylene glycol, and/or titanium dioxide, lacquer solutions, and suitable organic solvents or solvent mixtures. Dyestuffs or pigments may be added to the tablets or dragee coatings for identification or to characterize different combinations of active compound doses.

[0264] Pharmaceutical preparations which can be used orally include push-fit capsules made of gelatin, as well as soft, sealed capsules made of gelatin and a plasticizer, such as glycerol or sorbitol. The push-fit capsules can contain the active ingredients in admixture with filler such as lactose, binders such as starches, and/or lubricants such as talc or magnesium stearate and, optionally, stabilizers. In soft capsules, the active compounds may be dissolved or suspended in suitable liquids, such as fatty oils, liquid paraffin, or liquid polyethylene glycols. In addition, stabilizers may be added. All formulations for oral administration should be in dosages suitable for such administration. For buccal administration, the compositions may take the form of tablets or lozenges formulated in conventional manner.

[0265] For administration by inhalation, the compounds for use according to the present invention are conveniently delivered in the form of an aerosol spray presentation from pressurized packs or a nebuliser, with the use of a suitable propellant, e.g., dichlorodifluoromethane, trichlorofluoromethane, dichlorotetrafluoroethane, carbon dioxide or other suitable gas. In the case of a pressurized aerosol the dosage unit may be determined by providing a valve to deliver a metered amount. Capsules and cartridges of, e.g., gelatin for use in an inhaler or insufflator may be formulated containing a powder mix of the compound and a suitable powder base such as lactose or starch. The compounds may be formulated for parenteral administration by injection, e.g., by bolus injection or continuous infusion. Formulations for injection may be presented in unit dosage form, e.g., in ampules or in multi-dose containers, with an added preservative. The compositions may take such forms as suspensions, solutions or emulsions in oily or aqueous vehicles, and may contain formulatory agents such as suspending, stabilizing and/or dispersing agents.

[0266] Pharmaceutical formulations for parenteral administration include aqueous solutions of the active compounds in water-soluble form. Additionally, suspensions of the active compounds may be prepared as appropriate oily injection suspensions. Suitable lipophilic solvents or vehicles include fatty oils such as sesame oil, or synthetic fatty acid esters, such as ethyl oleate or triglycerides, or liposomes. Aqueous injection suspensions may contain substances which increase the viscosity of the suspension, such as sodium carboxymethyl cellulose, sorbitol, or dextran. Optionally, the suspension may also contain suitable stabilizers or agents which increase the solubility of the compounds to allow for the preparation of highly concentrated solutions. Alternatively, the active ingredient may be in powder form for constitution with a suitable vehicle, e.g., sterile pyrogen-free water, before use.

[0267] The compounds may also be formulated in rectal compositions such as suppositories or retention enemas, e.g., containing conventional suppository bases such as cocoa butter or other glycerides. In addition to the formulations described previously, the compounds may also be formulated as a depot preparation. Such long acting formulations may be administered by implantation (for example subcutaneously or intramuscularly) or by intramuscular injection. Thus, for example, the compounds may be formulated with suitable polymeric or hydrophobic materials (for example as an emulsion in an acceptable oil) or ion exchange resins, or as sparingly soluble derivatives, for example, as a sparingly soluble salt.

[0268] A pharmaceutical carrier for the hydrophobic compounds of the invention is a co-solvent system comprising benzyl alcohol, a nonpolar surfactant, a water-miscible organic polymer, and an aqueous phase. The co-solvent system may be the VPD co-solvent system. VPD is a solution of 3% w/v benzyl alcohol, 8% w/v of the nonpolar surfactant polysorbate 80, and 65% w/v polyethylene glycol 300, made up to volume in absolute ethanol. The VPD co-solvent system (VPD:5W) consists of VPD diluted 1:1 with a 5% dextrose in water solution. This co-solvent system dissolves hydrophobic compounds well, and itself produces low toxicity upon systemic administration. Naturally, the proportions of a co-solvent system may be varied considerably without destroying its solubility and toxicity characteristics. Furthermore, the identity of the co-solvent components may be varied: for example, other low-toxicity nonpolar. surfactants may be used instead of polysorbate 80; the fraction size of polyethylene glycol may be varied; other biocompatible polymers may replace polyethylene glycol, e.g. polyvinyl pyrrolidone; and other sugars or polysaccharides may substitute for dextrose. Alternatively, other delivery systems for hydrophobic pharmaceutical compounds may be employed. Liposomes and emulsions are well known examples of delivery vehicles or carriers for hydrophobic drugs. Certain organic solvents such as dimethylsulfoxide also may be employed, although usually at the cost of greater toxicity. Additionally, the compounds may be delivered using a sustained-release system, such as semipermeable matrices of solid hydrophobic polymers containing the therapeutic agent. Various types of sustained-release materials have been established and are well known by those skilled in the art. Sustained-release capsules may, depending on their chemical nature, release the compounds for a few weeks up to over 100 days. Depending on the chemical nature and the biological stability of the therapeutic reagent, additional strategies for protein or other active ingredient stabilization may be employed.

[0269] The pharmaceutical compositions also may comprise suitable solid or gel phase carriers or excipients. Examples of such carriers or excipients include but are not limited to calcium carbonate, calcium phosphate, various sugars, starches, cellulose derivatives, gelatin, and polymers such as polyethylene glycols. Many of the active ingredients of the invention may be provided as salts with pharmaceutically compatible counter ions. Such pharmaceutically acceptable base addition salts are those salts which retain the biological effectiveness and properties of the free acids and which are obtained by reaction with inorganic or organic bases such as sodium hydroxide, magnesium hydroxide, ammonia, trialkylamine, dialkylamine, monoalkylamine, dibasic amino acids, sodium acetate, potassium benzoate, triethanol amine and the like.

[0270] The pharmaceutical composition of the invention may be in the form of a complex of the protein(s) or other active ingredient(s) of present invention along with protein or peptide antigens. The protein and/or peptide antigen will deliver a stimulatory signal to both B and T lymphocytes. B lymphocytes will respond to antigen through their surface immunoglobulin receptor. T lymphocytes will respond to antigen through the T cell receptor (TCR) following presentation of the antigen by MHC proteins. MHC and structurally related proteins including those encoded by class I and class II MHC genes on host cells will serve to present the peptide antigen(s) to T lymphocytes. The antigen components could also be supplied as purified MHC-peptide complexes alone or with co-stimulatory molecules that can directly signal T cells. Alternatively antibodies able to bind surface immunoglobulin and other molecules on B cells as well as antibodies able to bind the TCR and other molecules on T cells can be combined with the pharmaceutical composition of the invention.

[0271] The pharmaceutical composition of the invention may be in the form of a liposome in which protein of the present invention is combined, in addition to other pharmaceutically acceptable carriers, with amphipathic agents such as lipids which exist in aggregated form as micelles, insoluble monolayers, liquid crystals, or lamellar layers in aqueous solution. Suitable lipids for liposomal formulation include, without limitation, monoglycerides, diglycerides, sulfatides, lysolecithins, phospholipids, saponin, bile acids, and the like. Preparation of such liposomal formulations is within the level of skill in the art, as disclosed, for example, in U.S. Pat. Nos. 4,235,871; 4,501,728; 4,837,028; and 4,737,323, all of which are incorporated herein by reference.

[0272] The amount of protein or other active ingredient of the present invention in the pharmaceutical composition of the present invention will depend upon the nature and severity of the condition being treated, and on the nature of prior treatments which the patient has undergone. Ultimately, the attending physician will decide the amount of protein or other active ingredient of the present invention with which to treat each individual patient. Initially, the attending physician will administer low doses of protein or other active ingredient of the present invention and observe the patient's response. Larger doses of protein or other active ingredient of the present invention may be administered until the optimal therapeutic effect is obtained for the patient, and at that point the dosage is not increased further. It is contemplated that the various pharmaceutical compositions used to practice the method of the present invention should contain about 0.01 μg to about 100 mg (preferably about 0.1 μg to about 10 mg, more preferably about 0.1 μg to about 1 mg) of protein or other active ingredient of the present invention per kg body weight. For compositions of the present invention which are useful for bone, cartilage, tendon or ligament regeneration, the therapeutic method includes administering the composition topically, systematically, or locally as an implant or device. When administered, the therapeutic composition for use in this invention is, of course, in a pyrogen-free, physiologically acceptable form. Further, the composition may desirably be encapsulated or injected in a viscous form for delivery to the site of bone, cartilage or tissue damage. Topical administration may be suitable for wound healing and tissue repair. Therapeutically useful agents other than a protein or other active ingredient of the invention which may also optionally be included in the composition as described above, may alternatively or additionally, be administered simultaneously or sequentially with the composition in the methods of the invention. Preferably for bone and/or cartilage formation, the composition would include a matrix capable of delivering the protein-containing or other active ingredient-containing composition to the site of bone and/or cartilage damage, providing a structure for the developing bone and cartilage and optimally capable of being resorbed into the body. Such matrices may be formed of materials presently in use for other implanted medical applications.

[0273] The choice of matrix material is based on biocompatibility, biodegradability, mechanical properties, cosmetic appearance and interface properties. The particular application of the compositions will define the appropriate formulation. Potential matrices for the compositions may be biodegradable and chemically defined calcium sulfate, tricalcium phosphate, hydroxyapatite, polylactic acid, polyglycolic acid and polyanhydrides. Other potential materials are biodegradable and biologically well-defined, such as bone or dermal collagen. Further matrices are comprised of pure proteins or extracellular matrix components. Other potential matrices are nonbiodegradable and chemically defined, such as sintered hydroxyapatite, bioglass, aluminates, or other ceramics. Matrices may be comprised of combinations of any of the above mentioned types of material, such as polylactic acid and hydroxyapatite or collagen and tricalcium phosphate. The bioceramics may be altered in composition, such as in calcium-aluminate-phosphate and processing to alter pore size, particle size, particle shape, and biodegradability. Presently preferred is a 50:50 (mole weight) copolymer of lactic acid and glycolic acid in the form of porous particles having diameters ranging from 150 to 800 microns. In some applications, it will be useful to utilize a sequestering agent, such as carboxymethyl cellulose or autologous blood clot, to prevent the protein compositions from disassociating from the matrix.

[0274] A preferred family of sequestering agents is cellulosic materials such as alkylcelluloses (including hydroxyalkylcelluloses), including methylcellulose, ethylcellulose, hydroxyethylcellulose, hydroxypropylcellulose, hydroxypropyl-methylcellulose, and carboxymethylcellulose, the most preferred being cationic salts of carboxymethylcellulose (CMC). Other preferred sequestering agents include hyaluronic acid, sodium alginate, poly(ethylene glycol), polyoxyethylene oxide, carboxyvinyl polymer and poly(vinyl alcohol). The amount of sequestering agent useful herein is 0.5-20 wt %, preferably 1-10 wt % based on total formulation weight, which represents the amount necessary to prevent desorption of the protein from the polymer matrix and to provide appropriate handling of the composition, yet not so much that the progenitor cells are prevented from infiltrating the matrix, thereby providing the protein the opportunity to assist the osteogenic activity of the progenitor cells. In further compositions, proteins or other active ingredients of the invention may be combined with other agents beneficial to the treatment of the bone and/or cartilage defect, wound, or tissue in question. These agents include various growth factors such as epidermal growth factor (EGF), platelet derived growth factor (PDGF), transforming growth factors (TGF-α and TGF-β), and insulin-like growth factor (IGF).

[0275] The therapeutic compositions are also presently valuable for veterinary applications. Particularly domestic animals and thoroughbred horses, in addition to humans, are desired patients for such treatment with proteins or other active ingredients of the present invention. The dosage regimen of a protein-containing pharmaceutical composition to be used in tissue regeneration will be determined by the attending physician considering various factors which modify the action of the proteins, e.g., amount of tissue weight desired to be formed, the site of damage, the condition of the damaged tissue, the size of a wound, type of damaged tissue (e.g., bone), the patient's age, sex, and diet, the severity of any infection, time of administration and other clinical factors. The dosage may vary with the type of matrix used in the reconstitution and with inclusion of other proteins in the pharmaceutical composition. For example, the addition of other known growth factors, such as IGF I (insulin like growth factor I), to the final composition, may also effect the dosage. Progress can be monitored by periodic assessment of tissue/bone growth and/or repair, for example, X-rays, histomorphometric determinations and tetracycline labeling.

[0276] Polynucleotides of the present invention can also be used for gene therapy. Such polynucleotides can be introduced either in vivo or ex vivo into cells for expression in a mammalian subject. Polynucleotides of the invention may also be administered by other known methods for introduction of nucleic acid into a cell or organism (including, without limitation, in the form of viral vectors or naked DNA). Cells may also be cultured ex vivo in the presence of proteins of the present invention in order to proliferate or to produce a desired effect on or activity in such cells. Treated cells can then be introduced in vivo for therapeutic purposes.

### 4.12.3 Effective Dosage

[0277] Pharmaceutical compositions suitable for use in the present invention include compositions wherein the active ingredients are contained in an effective amount to achieve its intended purpose. More specifically, a therapeutically effective amount means an amount effective to prevent development of or to alleviate the existing symptoms of the subject being treated. Determination of the effective amount is well within the capability of those skilled in the art, especially in light of the detailed disclosure provided herein. For any compound used in the method of the invention, the therapeutically effective dose can be estimated initially from appropriate in vitro assays. For example, a dose can be formulated in animal models to achieve a circulating concentration range that can be used to more accurately determine useful doses in humans. For example, a dose can be formulated in animal models to achieve a circulating concentration range that includes the IC₅₀ as determined in cell culture (i.e., the concentration of the test compound which achieves a half-maximal inhibition of the protein's biological activity). Such information can be used to more accurately determine useful doses in humans.

[0278] A therapeutically effective dose refers to that amount of the compound that results in amelioration of symptoms or a prolongation of survival in a patient. Toxicity and therapeutic efficacy of such compounds can be determined by standard pharmaceutical procedures in cell cultures or experimental animals, e.g., for determining the LD₅₀ (the dose lethal to 50% of the population) and the ED₅₀ (the dose therapeutically effective in 50% of the population). The dose ratio between toxic and therapeutic effects is the therapeutic index and it can be expressed as the ratio between LD₅₀ and ED₅₀. Compounds which exhibit high therapeutic indices are preferred. The data obtained from these cell culture assays and animal studies can be used in formulating a range of dosage for use in human. The dosage of such compounds lies preferably within a range of circulating concentrations that include the ED₅₀ with little or no toxicity. The dosage may vary within this range depending upon the dosage form employed and the route of administration utilized. The exact formulation, route of administration and dosage can be chosen by the individual physician in view of the patient's condition. See, e.g., Fingl et al., 1975, in “The Pharmacological Basis of Therapeutics”, Ch. 1 p. 1. Dosage amount and interval may be adjusted individually to provide plasma levels of the active moiety which are sufficient to maintain the desired effects, or minimal effective concentration (MEC). The MEC will vary for each compound but can be estimated from in vitro data. Dosages necessary to achieve the MEC will depend on individual characteristics and route of administration. However, HPLC assays or bioassays can be used to determine plasma concentrations.

[0279] Dosage intervals can also be determined using MEC value. Compounds should be administered using a regimen which maintains plasma levels above the MEC for 10-90% of the time, preferably between 30-90% and most preferably between 50-90%. In cases of local administration or selective uptake, the effective local concentration of the drug may not be related to plasma concentration.

[0280] An exemplary dosage regimen for polypeptides or other compositions of the invention will be in the range of about 0.01 μg/kg to 100 mg/kg of body weight daily, with the preferred dose being about 0.1 μg/kg to 25 mg/kg of patient body weight daily, varying in adults and children. Dosing may be once daily, or equivalent doses may be delivered at longer or shorter intervals.

[0281] The amount of composition administered will, of course, be dependent on the subject being treated, on the subject's age and weight, the severity of the affliction, the manner of administration and the judgment of the prescribing physician.

### 4.12.4 Packaging

[0282] The compositions may, if desired, be presented in a pack or dispenser device which may contain one or more unit dosage forms containing the active ingredient. The pack may, for example, comprise metal or plastic foil, such as a blister pack. The pack or dispenser device may be accompanied by instructions for administration. Compositions comprising a compound of the invention formulated in a compatible pharmaceutical carrier may also be prepared, placed in an appropriate container, and labeled for treatment of an indicated condition.

### 4.13 Antibodies

[0283] Also included in the invention are antibodies to proteins, or fragments of proteins of the invention. The term “antibody” as used herein refers to immunoglobulin molecules and immunologically active portions of immunoglobulin (Ig) molecules, i.e., molecules that contain an antigen binding site that specifically binds (immunoreacts with) an antigen. Such antibodies include, but are not limited to, polyclonal, monoclonal, chimeric, single chain, F_{ab}, F_{ab′} and F_{(ab′)2} fragments, and an F_{ab} expression library. In general, an antibody molecule obtained from humans relates to any of the classes IgG, IgM, IgA, IgE and IgD, which differ from one another by the nature of the heavy chain present in the molecule. Certain classes have subclasses as well, such as IgG₁, IgG₂, and others. Furthermore, in humans, the light chain may be a kappa chain or a lambda chain. Reference herein to antibodies includes a reference to all such classes, subclasses and types of human antibody species.

[0284] An isolated related protein of the invention may be intended to serve as an antigen, or a portion or fragment thereof, and additionally can be used as an immunogen to generate antibodies that immunospecifically bind the antigen, using standard techniques for polyclonal and monoclonal antibody preparation. The full-length protein can be used or, alternatively, the invention provides antigenic peptide fragments of the antigen for use as immunogens. An antigenic peptide fragment comprises at least 6 amino acid residues of the amino acid sequence of the full length protein, such as an amino acid sequence shown in SEQ ID NO: 4, and encompasses an epitope thereof such that an antibody raised against the peptide forms a specific immune complex with the full length protein or with any fragment that contains the epitope. Preferably, the antigenic peptide comprises at least 10 amino acid residues, or at least 15 amino acid residues, or at least 20 amino acid residues, or at least 30 amino acid residues. Preferred epitopes encompassed by the antigenic peptide are regions of the protein that are located on its surface; commonly these are hydrophilic regions.

[0285] In certain embodiments of the invention, at least one epitope encompassed by the antigenic peptide is a region of related protein that is located on the surface of the protein, e.g., a hydrophilic region. A hydrophobicity analysis of the human related protein sequence will indicate which regions of a related protein are particularly hydrophilic and, therefore, are likely to encode surface residues useful for targeting antibody production. As a means for targeting antibody production, hydropathy plots showing regions of hydrophilicity and hydrophobicity may be generated by any method well known in the art, including, for example, the Kyte Doolittle or the Hopp Woods methods, either with or without Fourier transformation. See, e.g., Hopp and Woods, 1981, Proc. Nat. Acad. Sci. USA 78: 3824-3828; Kyte and Doolittle 1982, J Mol. Biol. 157: 105-142, each of which is incorporated herein by reference in its entirety. Antibodies that are specific for one or more domains within an antigenic protein, or derivatives, fragments, analogs or homologs thereof, are also provided herein.

[0286] A protein of the invention, or a derivative, fragment, analog, homolog or ortholog thereof, may be utilized as an immunogen in the generation of antibodies that immunospecifically bind these protein components.

[0287] Various procedures known within the art may be used for the production of polyclonal or monoclonal antibodies directed against a protein of the invention, or against derivatives, fragments, analogs homologs or orthologs thereof (see, for example, Antibodies: A Laboratory Manual, Harlow E, and Lane D, 1988, Cold Spring Harbor Laboratory Press, Cold Spring Harbor, N.Y., incorporated herein by reference). Some of these antibodies are discussed below.

### 5.13.1 Polyclonal Antibodies

[0288] For the production of polyclonal antibodies, various suitable host animals (e.g., rabbit, goat, mouse or other mammal) may be immunized by one or more injections with the native protein, a synthetic variant thereof, or a derivative of the foregoing. An appropriate immunogenic preparation can contain, for example, the naturally occurring immunogenic protein, a chemically synthesized polypeptide representing the immunogenic protein, or a recombinantly expressed immunogenic protein. Furthermore, the protein may be conjugated to a second protein known to be immunogenic in the mammal being immunized. Examples of such immunogenic proteins include but are not limited to keyhole limpet hemocyanin, serum albumin, bovine thyroglobulin, and soybean trypsin inhibitor. The preparation can further include an adjuvant. Various adjuvants used to increase the immunological response include, but are not limited to, Freund's (complete and incomplete), mineral gels (e.g., aluminum hydroxide), surface active substances (e.g., lysolecithin, pluronic polyols, polyanions, peptides, oil emulsions, dinitrophenol, etc.), adjuvants usable in humans such as Bacille Calmette-Guerin and Corynebacterium parvum, or similar immunostimulatory agents. Additional examples of adjuvants which can be employed include MPL-TDM adjuvant (monophosphoryl Lipid A, synthetic trehalose dicorynomycolate).

[0289] The polyclonal antibody molecules directed against the immunogenic protein can be isolated from the mammal (e.g., from the blood) and further purified by well known techniques, such as affinity chromatography using protein A or protein G, which provide primarily the IgG fraction of immune serum. Subsequently, or alternatively, the specific antigen which is the target of the immunoglobulin sought, or an epitope thereof, may be immobilized on a column to purify the immune specific antibody by immunoaffinity chromatography. Purification of immunoglobulins is discussed, for example, by D. Wilkinson (The Scientist, published by The Scientist, Inc., Philadelphia Pa., Vol. 14, No. 8 (Apr. 17, 2000), pp. 25-28).

### 5.13.2 Monoclonal Antibodies

[0290] The term “monoclonal antibody” (MAb) or “monoclonal antibody composition”, as used herein, refers to a population of antibody molecules that contain only one molecular species of antibody molecule consisting of a unique light chain gene product and a unique heavy chain gene product. In particular, the complementarity determining regions (CDRs) of the monoclonal antibody are identical in all the molecules of the population. MAbs thus contain an antigen binding site capable of immunoreacting with a particular epitope of the antigen characterized by a unique binding affinity for it.

[0291] Monoclonal antibodies can be prepared using hybridoma methods, such as those described by Kohler and Milstein, Nature, 256:495 (1975). In a hybridoma method, a mouse, hamster, or other appropriate host animal, is typically immunized with an immunizing agent to elicit lymphocytes that produce or are capable of producing antibodies that will specifically bind to the immunizing agent. Alternatively, the lymphocytes can be immunized in vitro.

[0292] The immunizing agent will typically include the protein antigen, a fragment thereof or a fusion protein thereof. Generally, either peripheral blood lymphocytes are used if cells of human origin are desired, or spleen cells or lymph node cells are used if non-human mammalian sources are desired. The lymphocytes are then fused with an immortalized cell line using a suitable fusing agent, such as polyethylene glycol, to form a hybridoma cell (Goding, Monoclonal Antibodies: Principles and Practice, Academic Press, (1986) pp. 59-103). Immortalized cell lines are usually transformed mammalian cells, particularly myeloma cells of rodent, bovine and human origin. Usually, rat or mouse myeloma cell lines are employed. The hybridoma cells can be cultured in a suitable culture medium that preferably contains one or more substances that inhibit the growth or survival of the unfused, immortalized cells. For example, if the parental cells lack the enzyme hypoxanthine guanine phosphoribosyl transferase (HGPRT or HPRT), the culture medium for the hybridomas typically will include hypoxanthine, aminopterin, and thymidine (“HAT medium”), which substances prevent the growth of HGPRT-deficient cells.

[0293] Preferred immortalized cell lines are those that fuse efficiently, support stable high level expression of antibody by the selected antibody-producing cells, and are sensitive to a medium such as HAT medium. More preferred immortalized cell lines are murine myeloma lines, which can be obtained, for instance, from the Salk Institute Cell Distribution Center, San Diego, Calif. and the American Type Culture Collection, Manassas, Va. Human myeloma and mouse-human heteromyeloma cell lines also have been described for the production of human monoclonal antibodies (Kozbor, J. Immunol., 133:3001 (1984); Brodeur et al., Monoclonal Antibody Production Techniques and Applications, Marcel Dekker, Inc., New York, (1987) pp. 51-63).

[0294] The culture medium in which the hybridoma cells are cultured can then be assayed for the presence of monoclonal antibodies directed against the antigen. Preferably, the binding specificity of monoclonal antibodies produced by the hybridoma cells is determined by immunoprecipitation or by an in vitro binding assay, such as radioimmunoassay (RIA) or enzyme-linked immunoabsorbent assay (ELISA). Such techniques and assays are known in the art. The binding affinity of the monoclonal antibody can, for example, be determined by the Scatchard analysis of Munson and Pollard, Anal. Biochem., 107:220 (1980). Preferably, antibodies having a high degree of specificity and a high binding affinity for the target antigen are isolated.

[0295] After the desired hybridoma cells are identified, the clones can be subcloned by limiting dilution procedures and grown by standard methods. Suitable culture media for this purpose include, for example, Dulbecco's Modified Eagle's Medium and RPMI-1640 medium. Alternatively, the hybridoma cells can be grown in vivo as ascites in a mammal.

[0296] The monoclonal antibodies secreted by the subclones can be isolated or purified from the culture medium or ascites fluid by conventional immunoglobulin purification procedures such as, for example, protein A-Sepharose, hydroxylapatite chromatography, gel electrophoresis, dialysis, or affinity chromatography.

[0297] The monoclonal antibodies can also be made by recombinant DNA methods, such as those described in U.S. Pat. No. 4,816,567. DNA encoding the monoclonal antibodies of the invention can be readily isolated and sequenced using conventional procedures (e.g., by using oligonucleotide probes that are capable of binding specifically to genes encoding the heavy and light chains of murine antibodies). The hybridoma cells of the invention serve as a preferred source of such DNA. Once isolated, the DNA can be placed into expression vectors, which are then transfected into host cells such as simian COS cells, Chinese hamster ovary (CHO) cells, or myeloma cells that do not otherwise produce immunoglobulin protein to obtain the synthesis of monoclonal antibodies in the recombinant host cells. The DNA also can be modified, for example, by substituting the coding sequence for human heavy and light chain constant domains in place of the homologous murine sequences (U.S. Pat. No. 4,816,567; Morrison, Nature 368, 812-13 (1994)) or by covalently joining to the immunoglobulin coding sequence all or part of the coding sequence for a non-immunoglobulin polypeptide. Such a non-immunoglobulin polypeptide can be substituted for the constant domains of an antibody of the invention, or can be substituted for the variable domains of one antigen-combining site of an antibody of the invention to create a chimeric bivalent antibody.

### 5.13.2 Humanized Antibodies

[0298] The antibodies directed against the protein antigens of the invention can further comprise humanized antibodies or human antibodies. These antibodies are suitable for administration to humans without engendering an immune response by the human against the administered immunoglobulin. Humanized forms of antibodies are chimeric immunoglobulins, immunoglobulin chains or fragments thereof (such as Fv, Fab, Fab′, F(ab′)₂ or other antigen-binding subsequences of antibodies) that are principally comprised of the sequence of a human immunoglobulin, and contain minimal sequence derived from a non-human immunoglobulin. Humanization can be performed following the method of Winter and co-workers (Jones et al., Nature, 321:522-525 (1986); Riechmann et al., Nature, 332:323-327 (1988); Verhoeyen et al., Science, 239:1534-1536 (1988)), by substituting rodent CDRs or CDR sequences for the corresponding sequences of a human antibody. (See also U.S. Pat. No. 5,225,539.) In some instances, Fv framework residues of the human immunoglobulin are replaced by corresponding non-human residues. Humanized antibodies can also comprise residues which are found neither in the recipient antibody nor in the imported CDR or framework sequences. In general, the humanized antibody will comprise substantially all of at least one, and typically two, variable domains, in which all or substantially all of the CDR regions correspond to those of a non-human immunoglobulin and all or substantially all of the framework regions are those of a human immunoglobulin consensus sequence. The humanized antibody optimally also will comprise at least a portion of an immunoglobulin constant region (Fc), typically that of a human immunoglobulin (Jones et al., 1986; Riechmann et al., 1988; and Presta, Curr. Op. Struct. Biol., 2:593-596 (1992)).

### 5.13.3 Human Antibodies

[0299] Fully human antibodies relate to antibody molecules in which essentially the entire sequences of both the light chain and the heavy chain, including the CDRs, arise from human genes. Such antibodies are termed “human antibodies”, or “fully human antibodies” herein. Human monoclonal antibodies can be prepared by the trioma technique; the human B-cell hybridoma technique (see Kozbor, et al., 1983 Immunol Today 4: 72) and the EBV hybridoma technique to produce human monoclonal antibodies (see Cole, et al., 1985 In: MONOCLONAL ANTIBODIES AND CANCER THERAPY, Alan R. Liss, Inc., pp. 77-96). Human monoclonal antibodies may be utilized in the practice of the present invention and may be produced by using human hybridomas (see Cote, et al., 1983. Proc Natl. Acad Sci USA 80: 2026-2030) or by transforming human B-cells with Epstein Barr Virus in vitro (see Cole, et al., 1985 In: MONOCLONAL ANTIBODIES AND CANCER THERAPY, Alan R. Liss, Inc., pp. 77-96).

[0300] In addition, human antibodies can also be produced using additional techniques, including phage display libraries (Hoogenboom and Winter, J. Mol. Biol. 227:381 (1991); Marks et al., J. Mol. Biol., 222:581 (1991)). Similarly, human antibodies can be made by introducing human immunoglobulin loci into transgenic animals, e.g., mice in which the endogenous immunoglobulin genes have been partially or completely inactivated. Upon challenge, human antibody production is observed, which closely resembles that seen in humans in all respects, including gene rearrangement, assembly, and antibody repertoire. This approach is described, for example, in U.S. Pat. Nos. 5,545,807; 5,545,806; 5,569,825; 5,625,126; 5,633,425; 5,661,016, and in Marks et al. (Bio/Technology 10 779-783 (1992)); Lonberg et al. (Nature 368 856-859 (1994)); Morrison (Nature 368, 812-13 (1994)); Fishwild et al,(Nature Biotechnology 14, 845-51 (1996)); Neuberger (Nature Biotechnology 14, 826 (1996)); and Lonberg and Huszar (Intern. Rev. Immunol. 13 65-93 (1995)).

[0301] Human antibodies may additionally be produced using transgenic nonhuman animals which are modified so as to produce fully human antibodies rather than the animal's endogenous antibodies in response to challenge by an antigen. (See PCT publication WO94/02602). The endogenous genes encoding the heavy and light immunoglobulin chains in the nonhuman host have been incapacitated, and active loci encoding human heavy and light chain immunoglobulins are inserted into the host's genome. The human genes are incorporated, for example, using yeast artificial chromosomes containing the requisite human DNA segments. An animal which provides all the desired modifications is then obtained as progeny by crossbreeding intermediate transgenic animals containing fewer than the fill complement of the modifications. The preferred embodiment of such a nonhuman animal is a mouse, and is termed the Xenomouse™ as disclosed in PCT publications WO 96/33735 and WO 96/34096. This animal produces B cells which secrete fully human immunoglobulins. The antibodies can be obtained directly from the animal after immunization with an immunogen of interest, as, for example, a preparation of a polyclonal antibody, or alternatively from immortalized B cells derived from the animal, such as hybridomas producing monoclonal antibodies. Additionally, the genes encoding the immunoglobulins with human variable regions can be recovered and expressed to obtain the antibodies directly, or can be further modified to obtain analogs of antibodies such as, for example, single chain Fv molecules.

[0302] An example of a method of producing a nonhuman host, exemplified as a mouse, lacking expression of an endogenous immunoglobulin heavy chain is disclosed in U.S. Pat. No. 5,939,598. It can be obtained by a method including deleting the J segment genes from at least one endogenous heavy chain locus in an embryonic stem cell to prevent rearrangement of the locus and to prevent formation of a transcript of a rearranged immunoglobulin heavy chain locus, the deletion being effected by a targeting vector containing a gene encoding a selectable marker; and producing from the embryonic stem cell a transgenic mouse whose somatic and germ cells contain the gene encoding the selectable marker.

[0303] A method for producing an antibody of interest, such as a human antibody, is disclosed in U.S. Pat. No.5,916,771. It includes introducing an expression vector that contains a nucleotide sequence encoding a heavy chain into one mammalian host cell in culture, introducing an expression vector containing a nucleotide sequence encoding a light chain into another mammalian host cell, and fusing the two cells to form a hybrid cell. The hybrid cell expresses an antibody containing the heavy chain and the light chain.

[0304] In a further improvement on this procedure, a method for identifying a clinically relevant epitope on an immunogen, and a correlative method for selecting an antibody that binds immunospecifically to the relevant epitope with high affinity, are disclosed in PCT publication WO 99/53049.

### 5.13.4 F_{ab} Fragments and Single Chain Antibodies

[0305] According to the invention, techniques can be adapted for the production of single-chain antibodies specific to an antigenic protein of the invention (see e.g., U.S. Pat. No. 4,946,778). In addition, methods can be adapted for the construction of F_{ab} expression libraries (see e.g., Huse, et al., 1989 Science 246: 1275-1281) to allow rapid and effective identification of monoclonal F_{ab} fragments with the desired specificity for a protein or derivatives, fragments, analogs or homologs thereof. Antibody fragments that contain the idiotypes to a protein antigen may be produced by techniques known in the art including, but not limited to: (i) an F_{(ab′)2} fragment produced by pepsin digestion of an antibody molecule; (ii) an F_{ab} fragment generated by reducing the disulfide bridges of an F_{(ab′)2} fragment; (iii) an F_{ab} fragment generated by the treatment of the antibody molecule with papain and a reducing agent and (iv) Fᵥ fragments.

### 5.13.5 Bispecific Antibodies

[0306] Bispecific antibodies are monoclonal, preferably human or humanized, antibodies that have binding specificities for at least two different antigens. In the present case, one of the binding specificities is for an antigenic protein of the invention. The second binding target is any other antigen, and advantageously is a cell-surface protein or receptor or receptor subunit.

[0307] Methods for making bispecific antibodies are known in the art. Traditionally, the recombinant production of bispecific antibodies is based on the co-expression of two immunoglobulin heavy-chain/light-chain pairs, where the two heavy chains have different specificities (Milstein and Cuello, Nature, 305:537-539 (1983)). Because of the random assortment of immunoglobulin heavy and light chains, these hybridomas (quadromas) produce a potential mixture of ten different antibody molecules, of which only one has the correct bispecific structure. The purification of the correct molecule is usually accomplished by affinity chromatography steps. Similar procedures are disclosed in WO 93/08829, published May 13, 1993, and in Traunecker et al., 1991 EMBO J., 10:3655-3659.

[0308] Antibody variable domains with the desired binding specificities (antibody-antigen combining sites) can be fused to immunoglobulin constant domain sequences. The fusion preferably is with an immunoglobulin heavy-chain constant domain, comprising at least part of the hinge, CH2, and CH3 regions. It is preferred to have the first heavy-chain constant region (CH1) containing the site necessary for light-chain binding present in at least one of the fusions. DNAs encoding the immunoglobulin heavy-chain fusions and, if desired, the immunoglobulin light chain, are inserted into separate expression vectors, and are co-transfected into a suitable host organism. For further details of generating bispecific antibodies see, for example, Suresh et al., Methods in Enzymology 121:210 (1986).

[0309] According to another approach described in WO 96/27011, the interface between a pair of antibody molecules can be engineered to maximize the percentage of heterodimers which are recovered from recombinant cell culture. The preferred interface comprises at least a part of the CH3 region of an antibody constant domain. In this method, one or more small amino acid side chains from the interface of the first antibody molecule are replaced with larger side chains (e.g. tyrosine or tryptophan). Compensatory “cavities” of identical or similar size to the large side chain(s) are created on the interface of the second antibody molecule by replacing large amino acid side chains with smaller ones (e.g. alanine or threonine). This provides a mechanism for increasing the yield of the heterodimer over other unwanted end-products such as homodimers.

[0310] Bispecific antibodies can be prepared as full length antibodies or antibody fragments (e.g. F(ab′)₂ bispecific antibodies). Techniques for generating bispecific antibodies from antibody fragments have been described in the literature. For example, bispecific antibodies can be prepared using chemical linkage. Brennan et al., Science 229:81 (1985) describe a procedure wherein intact antibodies are proteolytically cleaved to generate F(ab′)₂ fragments. These fragments are reduced in the presence of the dithiol complexing agent sodium arsenite to stabilize vicinal dithiols and prevent intermolecular disulfide formation. The Fab′ fragments generated are then converted to thionitrobenzoate (TNB) derivatives. One of the Fab′-TNB derivatives is then reconverted to the Fab′-thiol by reduction with mercaptoethylamine and is mixed with an equimolar amount of the other Fab′-TNB derivative to form the bispecific antibody. The bispecific antibodies produced can be used as agents for the selective immobilization of enzymes.

[0311] Additionally, Fab′ fragments can be directly recovered from E. coli and chemically coupled to form bispecific antibodies. Shalaby et al., J. Exp. Med. 175:217-225 (1992) describe the production of a fully humanized bispecific antibody F(ab′)₂ molecule. Each Fab′ fragment was separately secreted from E. coli and subjected to directed chemical coupling in vitro to form the bispecific antibody. The bispecific antibody thus formed was able to bind to cells overexpressing the ErbB2 receptor and normal human T cells, as well as trigger the lytic activity of human cytotoxic lymphocytes against human breast tumor targets.

[0312] Various techniques for making and isolating bispecific antibody fragments directly from recombinant cell culture have also been described. For example, bispecific antibodies have been produced using leucine zippers. Kostelny et al., J. Immunol. 148(5):1547-1553 (1992). The leucine zipper peptides from the Fos and Jun proteins were linked to the Fab′ portions of two different antibodies by gene fusion. The antibody homodimers were reduced at the hinge region to form monomers and then re-oxidized to form the antibody heterodimers. This method can also be utilized for the production of antibody homodimers. The “diabody” technology described by Hollinger et al., Proc. Natl. Acad. Sci. USA 90:6444-6448 (1993) has provided an alternative mechanism for making bispecific antibody fragments. The fragments comprise a heavy-chain variable domain (V_{H}) connected to a light-chain variable domain (V_{L}) by a linker which is too short to allow pairing between the two domains on the same chain. Accordingly, the V_{H} and V_{L} domains of one fragment are forced to pair with the complementary V_{L} and V_{H} domains of another fragment, thereby forming two antigen-binding sites. Another strategy for making bispecific antibody fragments by the use of single-chain Fv (sFv) dimers has also been reported. See, Gruber et al., J. Immunol. 152:5368 (1994).

[0313] Antibodies with more than two valencies are contemplated. For example, trispecific antibodies can be prepared. Tutt et al., J. Immunol. 147:60 (1991). Exemplary bispecific antibodies can bind to two different epitopes, at least one of which originates in the protein antigen of the invention. Alternatively, an anti-antigenic arm of an immunoglobulin molecule can be combined with an arm which binds to a triggering molecule on a leukocyte such as a T-cell receptor molecule (e.g. CD2, CD3, CD28, or B7), or Fc receptors for IgG (FcγR), such as FcγRI (CD64), FcγRII (CD32) and FcγRIII (CD16) so as to focus cellular defense mechanisms to the cell expressing the particular antigen. Bispecific antibodies can also be used to direct cytotoxic agents to cells which express a particular antigen. These antibodies possess an antigen-binding arm and an arm which binds a cytotoxic agent or a radionuclide chelator, such as EOTUBE, DPTA, DOTA, or TETA. Another bispecific antibody of interest binds the protein antigen described herein and further binds tissue factor (TF).

### 5.13.6 Heteroconjugate Antibodies

[0314] Heteroconjugate antibodies are also within the scope of the present invention. Heteroconjugate antibodies are composed of two covalently joined antibodies. Such antibodies have, for example, been proposed to target immune system cells to unwanted cells (U.S. Pat. No. 4,676,980), and for treatment of HIV infection (WO 91/00360; WO 92/200373; EP 03089). It is contemplated that the antibodies can be prepared in vitro using known methods in synthetic protein chemistry, including those involving crosslinking agents. For example, immunotoxins can be constructed using a disulfide exchange reaction or by forming a thioether bond. Examples of suitable reagents for this purpose include iminothiolate and methyl-4-mercaptobutyrimidate and those disclosed, for example, in U.S. Pat. No. 4,676,980.

### 5.13.7 Effector Function Engineering

[0315] It can be desirable to modify the antibody of the invention with respect to effector function, so as to enhance, e.g., the effectiveness of the antibody in treating cancer. For example, cysteine residue(s) can be introduced into the Fc region, thereby allowing interchain disulfide bond formation in this region. The homodimeric antibody thus generated can have improved internalization capability and/or increased complement-mediated cell killing and antibody-dependent cellular cytotoxicity (ADCC). See Caron et al., J. Exp Med., 176: 1191-1195 (1992) and Shopes, J. Immunol., 148: 2918-2922 (1992). Homodimeric antibodies with enhanced anti-tumor activity can also be prepared using heterobifunctional cross-linkers as described in Wolff et al. Cancer Research, 53: 2560-2565 (1993). Alternatively, an antibody can be engineered that has dual Fc regions and can thereby have enhanced complement lysis and ADCC capabilities. See Stevenson et al., Anti-Cancer Drug Design, 3: 219-230 (1989).

### 5.13.8 Immunoconjugates

[0316] The invention also pertains to immunoconjugates comprising an antibody conjugated to a cytotoxic agent such as a chemotherapeutic agent, toxin (e.g., an enzymatically active toxin of bacterial, fungal, plant, or animal origin, or fragments thereof), or a radioactive isotope (i.e., a radioconjugate).

[0317] Chemotherapeutic agents useful in the generation of such immunoconjugates have been described above. Enzymatically active toxins and fragments thereof that can be used include diphtheria A chain, nonbinding active fragments of diphtheria toxin, exotoxin A chain (from Pseudomonas aeruginosa), ricin A chain, abrin A chain, modeccin A chain, alpha-sarcin, Aleurites fordii proteins, dianthin proteins, Phytolaca americana proteins (PAPI, PAPII, and PAP-S), momordica charantia inhibitor, curcin, crotin, sapaonaria officinalis inhibitor, gelonin, mitogellin, restrictocin, phenomycin, enomycin, and the tricothecenes. A variety of radionuclides are available for the production of radioconjugated antibodies. Examples include ²¹²Bi, ¹³¹I, ¹³¹In, ⁹⁰Y, and ¹⁸⁶Re.

[0318] Conjugates of the antibody and cytotoxic agent are made using a variety of bifunctional protein-coupling agents such as N-succinimidyl-3-(2-pyridyldithiol) propionate (SPDP), iminothiolane (IT), bifunctional derivatives of imidoesters (such as dimethyl adipimidate HCL), active esters (such as disuccinimidyl suberate), aldehydes (such as glutareldehyde), bis-azido compounds (such as bis (p-azidobenzoyl)hexanediamine), bis-diazonium derivatives (such as bis-(p-diazoniumbenzoyl)-ethylenediamine), diisocyanates (such as tolyene 2,6-diisocyanate), and bis-active fluorine compounds (such as 1,5-difluoro-2,4-dinitrobenzene). For example, a ricin immunotoxin can be prepared as described in Vitetta et al., Science, 238: 1098 (1987). Carbon-14-labeled 1-isothiocyanatobenzyl-3-methyldiethylene triaminepentaacetic acid (MX-DTPA) is an exemplary chelating agent for conjugation of radionucleotide to the antibody. See WO94/11026.

[0319] In another embodiment, the antibody can be conjugated to a “receptor” (such streptavidin) for utilization in tumor pretargeting wherein the antibody-receptor conjugate is administered to the patient, followed by removal of unbound conjugate from the circulation using a clearing agent and then administration of a “ligand” (e.g., avidin) that is in turn conjugated to a cytotoxic agent.

### 4.14 Computer Readable Sequences

[0320] In one application of this embodiment, a nucleotide sequence of the present invention can be recorded on computer readable media. As used herein, “computer readable media” refers to any medium which can be read and accessed directly by a computer. Such media include, but are not limited to: magnetic storage media, such as floppy discs, hard disc storage medium, and magnetic tape; optical storage media such as CD-ROM; electrical storage media such as RAM and ROM, and hybrids of these categories such as magnetic/optical storage media. A skilled artisan can readily appreciate how any of the presently known computer readable mediums can be used to create a manufacture comprising computer readable medium having recorded thereon a nucleotide sequence of the present invention. As used herein, “recorded” refers to a process for storing information on computer readable medium. A skilled artisan can readily adopt any of the presently known methods for recording information on computer readable medium to generate manufactures comprising the nucleotide sequence information of the present invention.

[0321] A variety of data storage structures are available to a skilled artisan for creating a computer readable medium having recorded thereon a nucleotide sequence of the present invention. The choice of the data storage structure will generally be based on the means chosen to access the stored information. In addition, a variety of data processor programs and formats can be used to store the nucleotide sequence information of the present invention on computer readable medium. The sequence information can be represented in a word processing text file, formatted in commercially-available software such as WordPerfect and Microsoft Word, or represented in the form of an ASCII file, stored in a database application, such as DB2, Sybase, Oracle, or the like. A skilled artisan can readily adapt any number of data processor structuring formats (e.g. text file or database) in order to obtain computer readable medium having recorded thereon the nucleotide sequence information of the present invention.

[0322] By providing any of the nucleotide sequences SEQ ID NO: 1-739 or a representative fragment thereof, or a nucleotide sequence at least 95% identical to any of the nucleotide sequences of SEQ ID NO: 1-739 in computer readable form, a skilled artisan can routinely access the sequence information for a variety of purposes. Computer software is publicly available which allows a skilled artisan to access sequence information provided in a computer readable medium. The examples which follow demonstrate how software which implements the BLAST (Altschul et al., J. Mol. Biol. 215:403-410 (1990)) and BLAZE (Brutlag et al., Comp. Chem. 17:203-207 (1993)) search algorithms on a Sybase system is used to identify open reading frames (ORFs) within a nucleic acid sequence. Such ORFs may be protein encoding fragments and may be useful in producing commercially important proteins such as enzymes used in fermentation reactions and in the production of commercially useful metabolites.

[0323] As used herein, “a computer-based system” refers to the hardware means, software means, and data storage means used to analyze the nucleotide sequence information of the present invention. The minimum hardware means of the computer-based systems of the present invention comprises a central processing unit (CPU), input means, output means, and data storage means. A skilled artisan can readily appreciate that any one of the currently available computer-based systems are suitable for use in the present invention. As stated above, the computer-based systems of the present invention comprise a data storage means having stored therein a nucleotide sequence of the present invention and the necessary hardware means and software means for supporting and implementing a search means. As used herein, “data storage means” refers to memory which can store nucleotide sequence information of the present invention, or a memory access means which can access manufactures having recorded thereon the nucleotide sequence information of the present invention.

[0324] As used herein, “search means” refers to one or more programs which are implemented on the computer-based system to compare a target sequence or target structural motif with the sequence information stored within the data storage means. Search means are used to identify fragments or regions of a known sequence which match a particular target sequence or target motif. A variety of known algorithms are disclosed publicly and a variety of commercially available software for conducting search means are and can be used in the computer-based systems of the present invention. Examples of such software includes, but is not limited to, Smith-Waterman; MacPattern (EMBL), BLASTN and BLASTA (NPOLYPEPTIDEIA). A skilled artisan can readily recognize that any one of the available algorithms or implementing software packages for conducting homology searches can be adapted for use in the present computer-based systems. As used herein, a “target sequence” can be any nucleic acid or amino acid sequence of six or more nucleotides or two or more amino acids. A skilled artisan can readily recognize that the longer a target sequence is, the less likely a target sequence will be present as a random occurrence in the database. The most preferred sequence length of a target sequence is from about 10 to 300 amino acids, more preferably from about 30 to 100 nucleotide residues. However, it is well recognized that searches for commercially important fragments, such as sequence fragments involved in gene expression and protein processing, may be of shorter length.

[0325] As used herein, “a target structural motif,” or “target motif,” refers to any rationally selected sequence or combination of sequences in which the sequence(s) are chosen based on a three-dimensional configuration which is formed upon the folding of the target motif. There are a variety of target motifs known in the art. Protein target motifs include, but are not limited to, enzyme active sites and signal sequences. Nucleic acid target motifs include, but are not limited to, promoter sequences, hairpin structures and inducible expression elements (protein binding sequences).

### 4.15 Triple Helix Formation

[0326] In addition, the fragments of the present invention, as broadly described, can be used to control gene expression through triple helix formation or antisense DNA or RNA, both of which methods are based on the binding of a polynucleotide sequence to DNA or RNA. Polynucleotides suitable for use in these methods are preferably 20 to 40 bases in length and are designed to be complementary to a region of the gene involved in transcription (triple helix—see Lee et al., Nucl. Acids Res. 6:3073 (1979); Cooney et al., Science 15241:456 (1988); and Dervan et al., Science 251:1360 (1991)) or to the mRNA itself (antisense—Olmno, J. Neurochem. 56:560 (1991); Oligodeoxynucleotides as Antisense Inhibitors of Gene Expression, CRC Press, Boca Raton, Fla. (1988)). Triple helix-formation optimally results in a shut-off of RNA transcription from DNA, while antisense RNA hybridization blocks translation of an mRNA molecule into polypeptide. Both techniques have been demonstrated to be effective in model systems. Information contained in the sequences of the present invention is necessary for the design of an antisense or triple helix oligonucleotide.

### 4.16 Diagnostic Assays and Kits

[0327] The present invention further provides methods to identify the presence or expression of one of the ORFs of the present invention, or homolog thereof, in a test sample, using a nucleic acid probe or antibodies of the present invention, optionally conjugated or otherwise associated with a suitable label.

[0328] In general, methods for detecting a polynucleotide of the invention can comprise contacting a sample with a compound that binds to and forms a complex with the polynucleotide for a period sufficient to form the complex, and detecting the complex, so that if a complex is detected, a polynucleotide of the invention is detected in the sample. Such methods can also comprise contacting a sample under stringent hybridization conditions with nucleic acid primers that anneal to a polynucleotide of the invention under such conditions, and amplifying annealed polynucleotides, so that if a polynucleotide is amplified, a polynucleotide of the invention is detected in the sample.

[0329] In general, methods for detecting a polypeptide of the invention can comprise contacting a sample with a compound that binds to and forms a complex with the polypeptide for a period sufficient to form the complex, and detecting the complex, so that if a complex is detected, a polypeptide of the invention is detected in the sample.

[0330] In detail, such methods comprise incubating a test sample with one or more of the antibodies or one or more of the nucleic acid probes of the present invention and assaying for binding of the nucleic acid probes or antibodies to components within the test sample.

[0331] Conditions for incubating a nucleic acid probe or antibody with a test sample vary. Incubation conditions depend on the format employed in the assay, the detection methods employed, and the type and nature of the nucleic acid probe or antibody used in the assay. One skilled in the art will recognize that any one of the commonly available hybridization, amplification or immunological assay formats can readily be adapted to employ the nucleic acid probes or antibodies of the present invention. Examples of such assays can be found in Chard, T., An Introduction to Radioimmunoassay and Related Techniques, Elsevier Science Publishers, Amsterdam, The Netherlands (1986); Bullock, G. R. et al., Techniques in Immunocytochemistry, Academic Press, Orlando, Fla. Vol. 1 (1982), Vol. 2 (1983), Vol. 3 (1985); Tijssen, P., Practice and Theory of immunoassays: Laboratory Techniques in Biochemistry and Molecular Biology, Elsevier Science Publishers, Amsterdam, The Netherlands (1985). The test samples of the present invention include cells, protein or membrane extracts of cells, or biological fluids such as sputum, blood, serum, plasma, or urine. The test sample used in the above-described method will vary based on the assay format, nature of the detection method and the tissues, cells or extracts used as the sample to be assayed. Methods for preparing protein extracts or membrane extracts of cells are well known in the art and can be readily be adapted in order to obtain a sample which is compatible with the system utilized.

[0332] In another embodiment of the present invention, kits are provided which contain the necessary reagents to carry out the assays of the present invention. Specifically, the invention provides a compartment kit to receive, in close confinement, one or more containers which comprises: (a) a first container comprising one of the probes or antibodies of the present invention; and (b) one or more other containers comprising one or more of the following: wash reagents, reagents capable of detecting presence of a bound probe or antibody.

[0333] In detail, a compartment kit includes any kit in which reagents are contained in separate containers. Such containers include small glass containers, plastic containers or strips of plastic or paper. Such containers allows one to efficiently transfer reagents from one compartment to another compartment such that the samples and reagents are not cross-contaminated, and the agents or solutions of each container can be added in a quantitative fashion from one compartment to another. Such containers will include a container which will accept the test sample, a container which contains the antibodies used in the assay, containers which contain wash reagents (such as phosphate buffered saline, Tris-buffers, etc.), and containers which contain the reagents used to detect the bound antibody or probe. Types of detection reagents include labeled nucleic acid probes, labeled secondary antibodies, or in the alternative, if the primary antibody is labeled, the enzymatic, or antibody binding reagents which are capable of reacting with the labeled antibody. One skilled in the art will readily recognize that the disclosed probes and antibodies of the present invention can be readily incorporated into one of the established kit formats which are well known in the art.

### 4.17 Medical Imaging

[0334] The novel polypeptides and binding partners of the invention are useful in medical imaging of sites expressing the molecules of the invention (e.g., where the polypeptide of the invention is involved in the immune response, for imaging sites of inflammation or infection). See, e.g., Kunkel et al., U.S. Pat. No. 5,413,778. Such methods involve chemical attachment of a labeling or imaging agent, administration of the labeled polypeptide to a subject in a pharmaceutically acceptable carrier, and imaging the labeled polypeptide in vivo at the target site.

### 4.18 Screening Assays

[0335] Using the isolated proteins and polynucleotides of the invention, the present invention further provides methods of obtaining and identifying agents which bind to a polypeptide encoded by an ORF corresponding to any of the nucleotide sequences set forth in SEQ ID NO: 1-739, or bind to a specific domain of the polypeptide encoded by the nucleic acid. In detail, said method comprises the steps of:

[0336] (a) contacting an agent with an isolated protein encoded by an ORF of the present invention, or nucleic acid of the invention; and

[0337] (b) determining whether the agent binds to said protein or said nucleic acid.

[0338] In general, therefore, such methods for identifying compounds that bind to a polynucleotide of the invention can comprise contacting a compound with a polynucleotide of the invention for a time sufficient to form a polynucleotide/compound complex, and detecting the complex, so that if a polynucleotide/compound complex is detected, a compound that binds to a polynucleotide of the invention is identified.

[0339] Likewise, in general, therefore, such methods for identifying compounds that bind to a polypeptide of the invention can comprise contacting a compound with a polypeptide of the invention for a time sufficient to form a polypeptide/compound complex, and detecting the complex, so that if a polypeptide/compound complex is detected, a compound that binds to a polynucleotide of the invention is identified.

[0340] Methods for identifying compounds that bind to a polypeptide of the invention can also comprise contacting a compound with a polypeptide of the invention in a cell for a time sufficient to form a polypeptide/compound complex, wherein the complex drives expression of a receptor gene sequence in the cell, and detecting the complex by detecting reporter gene sequence expression, so that if a polypeptide/compound complex is detected, a compound that binds a polypeptide of the invention is identified.

[0341] Compounds identified via such methods can include compounds which modulate the activity of a polypeptide of the invention (that is, increase or decrease its activity, relative to activity observed in the absence of the compound). Alternatively, compounds identified via such methods can include compounds which modulate the expression of a polynucleotide of the invention (that is, increase or decrease expression relative to expression levels observed in the absence of the compound). Compounds, such as compounds identified via the methods of the invention, can be tested using standard assays well known to those of skill in the art for their ability to modulate activity/expression.

[0342] The agents screened in the above assay can be, but are not limited to, peptides, carbohydrates, vitamin derivatives, or other pharmaceutical agents. The agents can be selected and screened at random or rationally selected or designed using protein modeling techniques.

[0343] For random screening, agents such as peptides, carbohydrates, pharmaceutical agents and the like are selected at random and are assayed for their ability to bind to the protein encoded by the ORF of the present invention. Alternatively, agents may be rationally selected or designed. As used herein, an agent is said to be “rationally selected or designed” when the agent is chosen based on the configuration of the particular protein. For example, one skilled in the art can readily adapt currently available procedures to generate peptides, pharmaceutical agents and the like, capable of binding to a specific peptide sequence, in order to generate rationally designed antipeptide peptides, for example see Hurby et al., Application of Synthetic Peptides: Antisense Peptides,” In Synthetic Peptides, A User's Guide, W. H. Freeman, NY (1992), pp. 289-307, and Kaspczak et al., Biochemistry 28:9230-8 (1989), or pharmaceutical agents, or the like.

[0344] In addition to the foregoing, one class of agents of the present invention, as broadly described, can be used to control gene expression through binding to one of the ORFs or EMFs of the present invention. As described above, such agents can be randomly screened or rationally designed/selected. Targeting the ORF or EMF allows a skilled artisan to design sequence specific or element specific agents, modulating the expression of either a single ORF or multiple ORFs which rely on the same EMF for expression control. One class of DNA binding agents are agents which contain base residues which hybridize or form a triple helix formation by binding to DNA or RNA. Such agents can be based on the classic phosphodiester, ribonucleic acid backbone, or can be a variety of sulfhydryl or polymeric derivatives which have base attachment capacity.

[0345] Agents suitable for use in these methods preferably contain 20 to 40 bases and are designed to be complementary to a region of the gene involved in transcription (triple helix—see Lee et al., Nucl. Acids Res. 6:3073 (1979); Cooney et al., Science 241:456 (1988); and Dervan et al., Science 251:1360 (1991)) or to the mRNA itself (antisense—Okano, J. Neurochem. 56:560 (1991); Oligodeoxynucleotides as Antisense Inhibitors of Gene Expression, CRC Press, Boca Raton, Fla. (1988)). Triple helix-formation optimally results in a shut-off of RNA transcription from DNA, while antisense RNA hybridization blocks translation of an mRNA molecule into polypeptide. Both techniques have been demonstrated to be effective in model systems. Information contained in the sequences of the present invention is necessary for the design of an antisense or triple helix oligonucleotide and other DNA binding agents.

[0346] Agents which bind to a protein encoded by one of the ORFs of the present invention can be used as a diagnostic agent. Agents which bind to a protein encoded by one of the ORFs of the present invention can be formulated using known techniques to generate a pharmaceutical composition.

### 4.19 Use of Nucleic Acids as Probes

[0347] Another aspect of the subject invention is to provide for polypeptide-specific nucleic acid hybridization probes capable of hybridizing with naturally occurring nucleotide sequences. The hybridization probes of the subject invention may be derived from any of the nucleotide sequences SEQ ID NO: 1-739. Because the corresponding gene is only expressed in a limited number of tissues, a hybridization probe derived from of any of the nucleotide sequences SEQ ID NO: 1-739 can be used as an indicator of the presence of RNA of cell type of such a tissue in a sample.

[0348] Any suitable hybridization technique can be employed, such as, for example, in situ hybridization. PCR as described in U.S. Pat. Nos. 4,683,195 and 4,965,188 provides additional uses for oligonucleotides based upon the nucleotide sequences. Such probes used in PCR may be of recombinant origin, may be chemically synthesized, or a mixture of both. The probe will comprise a discrete nucleotide sequence for the detection of identical sequences or a degenerate pool of possible sequences for identification of closely related genomic sequences.

[0349] Other means for producing specific hybridization probes for nucleic acids include the cloning of nucleic acid sequences into vectors for the production of mRNA probes. Such vectors are known in the art and are commercially available and may be used to synthesize RNA probes in vitro by means of the addition of the appropriate RNA polymerase as T7 or SP6 RNA polymerase and the appropriate radioactively labeled nucleotides. The nucleotide sequences may be used to construct hybridization probes for mapping their respective genomic sequences. The nucleotide sequence provided herein may be mapped to a chromosome or specific regions of a chromosome using well known genetic and/or chromosomal mapping techniques. These techniques include in situ hybridization, linkage analysis against known chromosomal markers, hybridization screening with libraries or flow-sorted chromosomal preparations specific to known chromosomes, and the like. The technique of fluorescent in situ hybridization of chromosome spreads has been described, among other places, in Verma et al (1988) Human Chromosomes: A Manual of Basic Techniques, Pergamon Press, New York N.Y.

[0350] Fluorescent in situ hybridization of chromosomal preparations and other physical chromosome mapping techniques may be correlated with additional genetic map data. Examples of genetic map data can be found in the 1994 Genome Issue of Science (265:1981f). Correlation between the location of a nucleic acid on a physical chromosomal map and a specific disease (or predisposition to a specific disease) may help delimit the region of DNA associated with that genetic disease. The nucleotide sequences of the subject invention may be used to detect differences in gene sequences between normal, carrier or affected individuals.

### 4.20 Preparation of Support Bound Oligonucleotides

[0351] Oligonucleotides, i.e., small nucleic acid segments, may be readily prepared by, for example, directly synthesizing the oligonucleotide by chemical means, as is commonly practiced using an automated oligonucleotide synthesizer.

[0352] Support bound oligonucleotides may be prepared by any of the methods known to those of skill in the art using any suitable support such as glass, polystyrene or Teflon. One strategy is to precisely spot oligonucleotides synthesized by standard synthesizers. Immobilization can be achieved using passive adsorption (Inouye & Hondo, (1990) J. Clin. Microbiol. 28(6) 1469-72); using UV light (Nagata et al., 1985; Dahlen et al., 1987; Morrissey & Collins, (1989) Mol. Cell Probes 3(2) 189-207) or by covalent binding of base modified DNA (Keller et al., 1988; 1989); all references being specifically incorporated herein.

[0353] Another strategy that may be employed is the use of the strong biotin-streptavidin interaction as a linker. For example, Broude et al. (1994) Proc. Natl. Acad. Sci. USA 91(8) 3072-6, describe the use of biotinylated probes, although these are duplex probes, that are immobilized on streptavidin-coated magnetic beads. Streptavidin-coated beads may be purchased from Dynal, Oslo. Of course, this same linking chemistry is applicable to coating any surface with streptavidin. Biotinylated probes may be purchased from various sources, such as, e.g., Operon Technologies (Alameda, Calif.).

[0354] Nunc Laboratories (Naperville, Ill.) is also selling suitable material that could be used. Nunc Laboratories have developed a method by which DNA can be covalently bound to the microwell surface termed Covalink NH. CovaLink NH is a polystyrene surface grafted with secondary amino groups (>NH) that serve as bridge-heads for further covalent coupling. CovaLink Modules may be purchased from Nunc Laboratories. DNA molecules may be bound to CovaLink exclusively at the 5′-end by a phosphoramidate bond, allowing immobilization of more than 1 pmol of DNA (Rasmussen et al., (1991) Anal. Biochem. 198(1) 138-42).

[0355] The use of CovaLink NH strips for covalent binding of DNA molecules at the 5′-end has been described (Rasmussen et al., (1991). In this technology, a phosphoramidate bond is employed (Chu et al., (1983) Nucleic Acids Res. 11 (8) 6513-29). This is beneficial as immobilization using only a single covalent bond is preferred. The phosphoramidate bond joins the DNA to the CovaLink NH secondary amino groups that are positioned at the end of spacer arms covalently grafted onto the polystyrene surface through a 2 nm long spacer arm. To link an oligonucleotide to CovaLink NH via an phosphoramidate bond, the oligonucleotide terminus must have a 5′-end phosphate group. It is, perhaps, even possible for biotin to be covalently bound to CovaLink and then streptavidin used to bind the probes.

[0356] More specifically,the linkage method includes dissolving DNA in water (7.5 ng/ul) and denaturing for 10 min. at 95° C. and cooling on ice for 10 min. Ice-cold 0.1 M 1-methylimidazole,pH 7.0 (1-MeIm₇), is then added to a final concentration of 10 mM 1-MeIm₇. A ss DNA solution is then dispensed into CovaLink NH strips (75 ul/well) standing on ice.

[0357] Carbodiimide 0.2 M 1-ethyl-3-(3-dimethylaminopropyl)-carbodiimide (EDC), dissolved in 10 mM 1-MeIm₇, is made fresh and 25 ul added per well. The strips are incubated for 5 hours at 50° C. After incubation the strips are washed using, e.g., Nunc-Immuno Wash; first the wells are washed 3 times, then they are soaked with washing solution for 5 min., and finally they are washed 3 times (where in the washing solution is 0.4 N NaOH, 0.25% SDS heated to 50° C.).

[0358] It is contemplated that a further suitable method for use with the present invention is that described in PCT Patent Application WO 90/03382 (Southern & Maskos), incorporated herein by reference. This method of preparing an oligonucleotide bound to a support involves attaching a nucleoside 3′-reagent through the phosphate group by a covalent phosphodiester link to aliphatic hydroxyl groups carried by the support. The oligonucleotide is then synthesized on the supported nucleoside and protecting groups removed from the synthetic oligonucleotide chain under standard conditions that do not cleave the oligonucleotide from the support. Suitable reagents include nucleoside phosphoramidite and nucleoside hydrogen phosphorate.

[0359] An on-chip strategy for the preparation of DNA probe for the preparation of DNA probe arrays may be employed. For example, addressable laser-activated photodeprotection may be employed in the chemical synthesis of oligonucleotides directly on a glass surface, as described by Fodor et al. (1991) Science 251(4995) 767-73, incorporated herein by reference. Probes may also be immobilized on nylon supports as described by Van Ness et al. (1991) Nucleic Acids Res. 19(12) 3345-50; or linked to Teflon using the method of Duncan & Cavalier (1988) Anal. Biochem. 169(1) 104-8; all references being specifically incorporated herein.

[0360] To link an oligonucleotide to a nylon support, as described by Van Ness et al. (1991), requires activation of the nylon surface via alkylation and selective activation of the 5′-amine of oligonucleotides with cyanuric chloride.

[0361] One particular way to prepare support bound oligonucleotides is to utilize the light-generated synthesis described by Pease et al., (1994) PNAS USA 91(11) 5022-6, incorporated herein by reference). These authors used current photolithographic techniques to generate arrays of immobilized oligonucleotide probes (DNA chips). These methods, in which light is used to direct the synthesis of oligonucleotide probes in high-density, miniaturized arrays, utilize photolabile 5′-protected N-acyl-deoxynucleoside phosphoramidites, surface linker chemistry and versatile combinatorial synthesis strategies. A matrix of 256 spatially defined oligonucleotide probes may be generated in this manner.

### 4.21 Preparation of Nucleic Acid Fragments

[0362] The nucleic acids may be obtained from any appropriate source, such as cDNAs, genomic DNA, chromosomal DNA, microdissected chromosome bands, cosmid or YAC inserts, and RNA, including mRNA without any amplification steps. For example, Sambrook et al. (1989) describes three protocols for the isolation of high molecular weight DNA from mammalian cells (p. 9.14-9.23).

[0363] DNA fragments may be prepared as clones in M13, plasmid or lambda vectors and/or prepared directly from genomic DNA or cDNA by PCR or other amplification methods. Samples may be prepared or dispensed in multiwell plates. About 100-1000 ng of DNA samples may be prepared in 2-500 ml of final volume.

[0364] The nucleic acids would then be fragmented by any of the methods known to those of skill in the art including, for example, using restriction enzymes as described at 9.24-9.28 of Sambrook et al. (1989), shearing by ultrasound and NaOH treatment.

[0365] Low pressure shearing is also appropriate, as described by Schriefer et al. (1990) Nucleic Acids Res. 18(24) 7455-6, incorporated herein by reference). In this method, DNA samples are passed through a small French pressure cell at a variety of low to intermediate pressures. A lever device allows controlled application of low to intermediate pressures to the cell. The results of these studies indicate that low-pressure shearing is a useful alternative to sonic and enzymatic DNA fragmentation methods.

[0366] One particularly suitable way for fragmenting DNA is contemplated to be that using the two base recognition endonuclease, CviJI, described by Fitzgerald et al. (1992) Nucleic Acids Res.20(14)3753-62. These authors described an approach for the rapid fragmentation and fractionation of DNA into particular sizes that they contemplated to be suitable for shotgun cloning and sequencing.

[0367] The restriction endonuclease CviJI normally cleaves the recognition sequence PuGCPy between the G and C to leave blunt ends. Atypical reaction conditions, which alter the specificity of this enzyme (CviJI**), yield a quasi-random distribution of DNA fragments form the small molecule pUC19 (2688 base pairs). Fitzgerald et al. (1992) quantitatively evaluated the randomness of this fragmentation strategy, using a CviJI** digest of pUC19 that was size fractionated by a rapid gel filtration method and directly ligated, without end repair, to a lac Z minus M13 cloning vector. Sequence analysis of 76 clones showed that CviJI** restricts pyGCPy and PuGCPu, in addition to PuGCPy sites, and that new sequence data is accumulated at a rate consistent with random fragmentation.

[0368] As reported in the literature, advantages of this approach compared to sonication and agarose gel fractionation include: smaller amounts of DNA are required (0.2-0.5 ug instead of 2-5 ug); and fewer steps are involved (no preligation, end repair, chemical extraction, or agarose gel electrophoresis and elution are needed

[0369] Irrespective of the manner in which the nucleic acid fragments are obtained or prepared, it is important to denature the DNA to give single stranded pieces available for hybridization. This is achieved by incubating the DNA solution for 2-5 minutes at 80-90° C. The solution is then cooled quickly to 2° C. to prevent renaturation of the DNA fragments before they are contacted with the chip. Phosphate groups must also be removed from genomic DNA by methods known in the art.

### 4.22 Preparation of DNA Arrays

[0370] Arrays may be prepared by spotting DNA samples on a support such as a nylon membrane. Spotting may be performed by using arrays of metal pins (the positions of which correspond to an array of wells in a microtiter plate) to repeated by transfer of about 20 nl of a DNA solution to a nylon membrane. By offset printing, a density of dots higher than the density of the wells is achieved. One to 25 dots may be accommodated in 1 mm², depending on the type of label used. By avoiding spotting in some preselected number of rows and columns, separate subsets (subarrays) may be formed. Samples in one subarray may be the same genomic segment of DNA (or the same gene) from different individuals, or may be different, overlapped genomic clones. Each of the subarrays may represent replica spotting of the same samples. In one example, a selected gene segment may be amplified from 64 patients. For each patient, the amplified gene segment may be in one 96-well plate (all 96 wells containing the same sample). A plate for each of the 64 patients is prepared. By using a 96-pin device, all samples may be spotted on one 8×12 cm membrane. Subarrays may contain 64 samples, one from each patient. Where the 96 subarrays are identical, the dot span may be 1 mm² and there may be a 1 mm space between subarrays.

[0371] Another approach is to use membranes or plates (available from NUNC, Naperville, Ill.) which may be partitioned by physical spacers e.g. a plastic grid molded over the membrane, the grid being similar to the sort of membrane applied to the bottom of multiwell plates, or hydrophobic strips. A fixed physical spacer is not preferred for imaging by exposure to flat phosphor-storage screens or x-ray films.

[0372] The present invention is illustrated in the following examples. Upon consideration of the present disclosure, one of skill in the art will appreciate that many other embodiments and variations may be made in the scope of the present invention. Accordingly, it is intended that the broader aspects of the present invention not be limited to the disclosure of the following examples. The present invention is not to be limited in scope by the exemplified embodiments which are intended as illustrations of single aspects of the invention, and compositions and methods which are functionally equivalent are within the scope of the invention. Indeed, numerous modifications and variations in the practice of the invention are expected to occur to those skilled in the art upon consideration of the present preferred embodiments. Consequently, the only limitations which should be placed upon the scope of the invention are those which appear in the appended claims.

[0373] All references cited within the body of the instant specification are hereby incorporated by reference in their entirety.

### 5.0 EXAMPLES

### 5.1 Example 1

[0374] Novel Nucleic Acid Sequences Obtained from Various Libraries

[0375] A plurality of novel nucleic acids were obtained from cDNA libraries prepared from various human tissues and in some cases isolated from a genomic library derived from human chromosome using standard PCR, SBH sequence signature analysis and Sanger sequencing techniques. The inserts of the library were amplified with PCR using primers specific for the vector sequences which flank the inserts. Clones from cDNA libraries were spotted on nylon membrane filters and screened with oligonucleotide probes (e.g., 7-mers) to obtain signature sequences. The clones were clustered into groups of similar or identical sequences. Representative clones were selected for sequencing.

[0376] In some cases, the 5′ sequence of the amplified inserts was then deduced using a typical Sanger sequencing protocol. PCR products were purified and subjected to fluorescent dye terminator cycle sequencing. Single pass gel sequencing was done using a 377 Applied Biosystems (ABI) sequencer to obtain the novel nucleic acid sequences. In some cases RACE Random Amplification of cDNA Ends) was performed to further extend the sequence in the 5′ direction.

### 5.2 Example 2

[0377] Novel Contigs

[0378] The novel contigs of the invention were assembled from sequences that were obtained from a cDNA library by methods described in Example 1 above, and in some cases sequences obtained from one or more public databases. Chromatograms were base called and assembled using a software suite from University of Washington, Seattle containing three applications designated PHRED, PHRAP, and CONSED. The sequences for the resulting nucleic acid contigs are designated as SEQ ID NO: 1-739 and are provided in the attached Sequence Listing. The contigs were assembled using an EST sequence as a seed. Then a recursive algorithm was used to extend the seed EST into an extended assemblage, by pulling additional sequences from different databases (i.e., Hyseq's database containing EST sequences, dbEST version 120, gb pri 120, UniGene version 120, and Genpept 120) that belong to this assemblage. The algorithm terminated when there was no additional sequences from the above databases that would extend the assemblage. Inclusion of component sequences into the assemblage was based on a BLASTN hit to the extending assemblage with BLAST score greater than 300 and percent identity greater than 95%.

[0379] The nearest neighbor result for the assembled contig was obtained by a FASTA version 3 search against Genpept release 120, using FASTXY algorithm. FASTXY is an improved version of FASTA alignment which allows in-codon frame shifts. The nearest neighbor result showed the closest homologue for each assemblage from Genpept (and contains the translated amino acid sequences for which the assemblage encodes). The nearest neighbor results for SEQ ID NO: 1-739 are shown in Table 2.

[0380] Tables 1, 2, and 3 follow. Table 1 shows the various tissue sources of SEQ ID NO: 1-739. Table 2 shows the nearest neighbor result for the assembled contig. The nearest neighbor result shows the closest homologue for each assemblage and contains the translated amino acid sequences for which the assemblage encodes. Table 2 also shows homologues with identifiable functions for SEQ ID NO: 1-739. The polypeptides were predicted using a software program called FASTY (available from http://fasta.bioch.virginia.edu) which selects a polypeptide based on a comparison of translated novel polynucleotides to known polynucleotides (W. R. Pearson, Methods in Enzymology, Vol. 183: pp. 63-98, (1990), herein incorporated by reference). Table 3 shows the predicted amino acid sequence corresponding to the novel nucleic acid contig sequences.

TABLE 1
Tissue Sources

| | | Hyseq | |
|---|---|---|---|
| Tissue | | Library | |
| Origin | RNA Source | Name | SEQ ID NOS: |
| adult brain | GIBCO | AB3001 | 28 46 54 62 95 117 134 175 188-189 |
| | | | 324 330 337 356 369 371 378 386 |
| | | | 389 396 432 435-436 468 472-473 |
| | | | 476-477 483 486 518 538-539 543 |
| | | | 545 557 565 571 573 578 582 598 |
| | | | 613-614 619 627 632 634 639 687 |
| | | | 709 |
| adult brain | GIBCO | ABD003 | 5 12 46 52 57 66 79 91 97 134 144 |
| | | | 148 150 162 164 172 175-176 181 |
| | | | 186 193 250 323 325-327 330 334 |
| | | | 338 362 367 369 371 378-379 386 |
| | | | 388-389 392 396-397 399-401 403 |
| | | | 416 422 435 444 449 451 454 461 |
| | | | 463-464 468 472-473 483 486 494 |
| | | | 506 511 513 516 520 523-524 526 |
| | | | 529 533 536-537 539 545 548 552 |
| | | | 556 558-559 562-563 565 567 569 |
| | | | 573-574 576 579-580 582-584 590 |
| | | | 593-594 598 602 606 613-614 619-621 |
| | | | 623-624 627 634 637 641 646 |
| | | | 648 659 675 688-689 694 696-698 |
| | | | 703 714 729 |
| adult brain | Clontech | ABR001 | 57 162 164 227 266 316 334 356 367 |
| | | | 385 438 468 512 524 528 557 582 |
| | | | 590 621 627 631 634 689 714 |
| adult brain | Clontech | ABR006 | 189 228 385 438 571 584 632 650 |
| | | | 677 |
| adult brain | Clontech | ABR008 | 1 3 5 11-25 31-32 46-47 55-57 59 |
| | | | 61 65-67 69 75 79 91 103 108 111 |
| | | | 113-114 126 132 150 160 162 164 |
| | | | 171-172 186 188-189 193 202-203 |
| | | | 206 210-212 220 222-224 227-229 |
| | | | 233 235-236 243-247 251-252 257 |
| | | | 264-266 268 275 313 324 328-331 |
| | | | 334-335 338-339 343 346-347 351 |
| | | | 355 357 359-361 365 367 370-371 |
| | | | 378 380 382 386-389 391 396 399-400 |
| | | | 402 406 413 419-420 423 426 |
| | | | 432 434 437-438 442 446 448-449 |
| | | | 459-460 465 468 470 472-473 475 |
| | | | 481-483 487 489-490 495-497 499 |
| | | | 501 503-504 507-509 511 520 524 |
| | | | 526 528 532-533 536 539-540 543-546 |
| | | | 551-552 556-557 563 565-567 |
| | | | 569 572-573 576-577 579-580 582 |
| | | | 584 586 590-591 593 595-597 599-602 |
| | | | 604 610-616 620-621 624-625 |
| | | | 627-628 632 634 637-638 641 643-644 |
| | | | 646-647 650 653-657 660-662 |
| | | | 668 672 675 677-678 680-681 688-689 |
| | | | 691 693 695-696 698 706-707 |
| | | | 709 711 713-727 729 731 733-734 |
| | | | 736 738-739 |
| adult brain | Clontech | ABR011 | 334 476 634 677 |
| adult brain | BioChain | ABR012 | 379 587 |
| adult brain | Invitrogen | ABR013 | 334 634 |
| adult brain | Invitrogen | ABT004 | 3 19 57 62 66 75 110 122 150 160 |
| | | | 162 167 171 176 186 197 203 211 |
| | | | 230 232 259 328-331 334 369 382 |
| | | | 389 394 400 406 417 426 429 442 |
| | | | 457 472 483-484 492 511 514 529 |
| | | | 531 534 537 540 553 558 562 572 |
| | | | 580 582-584 590 604 611 613 615 |
| | | | 622 637 639 643-644 648 688-689 |
| | | | 692 695 |
| cultured | Strategene | ADP001 | 16 37-39 66 109 120 141 144 193 |
| preadipocytes | | | 273 316 331 333 338 389 415 429 |
| | | | 442 444 464-465 475 489 501 511 |
| | | | 513 531 534 539-540 545-546 557 |
| | | | 583-584 590 596 602 607 613 615 |
| | | | 619 622 629 632 634 643 |
| adrenal | Clontech | ADR002 | 4-5 12 48 53 57 162 164 172 186 |
| gland | | | 188 192 196 203 207 213 258 316 |
| | | | 330-331 333 339 354 356-357 369 |
| | | | 383 385 388 392 395 402 406 411 |
| | | | 415 434 454-455 465 468 473 475 |
| | | | 477 491 498 501 509 511 517 528-529 |
| | | | 532 537-539 542 545 558 560 |
| | | | 565 567 576-577 586 600 606 615 |
| | | | 621 624 627 632 634 647 653 660 |
| | | | 667 683 689 696 714 |
| adult heart | GIBCO | AHR001 | 28 39 57 64-65 75 79 89 97-98 108 |
| | | | 117 134 144 157 159-160 164-166 |
| | | | 169 171 174 184 192-193 203 207 |
| | | | 220 243 256 258 266-267 281 314 |
| | | | 316 318 328-329 331 338-339 341 |
| | | | 346 348 354 356-357 366-367 369 |
| | | | 371 377-379 382 385-386 388 393 |
| | | | 395-396 399-401 403 415 420 422 |
| | | | 425 431-432 435-436 445 451 459 |
| | | | 465 472-473 477 483 486 488 490 |
| | | | 496 501 503 508 515 519-520 526 |
| | | | 528 531 533-534 537-538 540-541 |
| | | | 544 546 552 556-557 562-563 566-571 |
| | | | 573 576-581 583-584 586-587 |
| | | | 594 602 606 608 611 613-615 618 |
| | | | 620-621 626-628 632 634 641 643 |
| | | | 646 648 653 659 667 676 678 687 |
| | | | 689 696 703-704 708 711 714 729-730 |
| adult | GIBCO | AKD001 | 3 28-29 48 56-57 67 79 84 93 106 |
| kidney | | | 117 134 138 140 144 156 160-164 |
| | | | 168-170 172 177 183 188-189 192-193 |
| | | | 199 203 207 235 251 257 275 |
| | | | 319 321-323 328-330 337 346-347 |
| | | | 349 354-356 360 367-369 371 375 |
| | | | 378-381 383-386 388-389 392 396-397 |
| | | | 399 401 404 407 409 411-412 |
| | | | 415-416 420-422 427 432 436-437 |
| | | | 439-440 444 451-456 458-459 464-465 |
| | | | 468 470 472-473 477 481 483 |
| | | | 486-487 492 496 501 503 505-506 |
| | | | 508 511 513-516 518 524 526 529 |
| | | | 533 535 537-541 543 545-546 548 |
| | | | 552 557 559-560 562-563 565-569 |
| | | | 572-574 576-577 579-587 589-591 |
| | | | 593-594 602 604-607 613-614 617-618 |
| | | | 620-624 627-628 630 632-635 |
| | | | 637-638 640-642 644-645 652 662 |
| | | | 664 667-668 677 682 685 687 689 |
| | | | 694-696 698 703 716 723 728-729 |
| | | | 732 734 |
| adult | Invitrogen | AKT002 | 92 136 154 160 164 178 271 314 347 |
| kidney | | | 353 360 367 376 378-379 386 391 |
| | | | 402 409 423 432 449 451 477 490 |
| | | | 494 503 526 528 531 534 538-539 |
| | | | 541 545-546 559 566 579 584 588 |
| | | | 594 602 613 621 624 632 647 652 |
| | | | 689 |
| adult lung | GIBCO | ALG001 | 56-57 67 69 98 113 134 144 164 172 |
| | | | 191-192 270 321 328 338 369 371 |
| | | | 374 378 380 388-389 396 405 411 |
| | | | 416 424 443-444 456 473-474 482-483 |
| | | | 497 508 518 529 531 534 536 |
| | | | 540 552 556 559 563 568 573 579-580 |
| | | | 585-586 588-589 593 601-602 |
| | | | 606 612-613 618 634 662 667 685 |
| | | | 696 702 726 729-730 |
| lymph node | Clontech | ALN001 | 28 57 79 113 164 172 179 193 240 |
| | | | 325 332 367 378-379 386 388 402 |
| | | | 485 526 580 586 603 613-614 621-622 |
| | | | 628 634 662 667 686 734 |
| young liver | GIBCO | ALV001 | 3 24 28 54 60 117 134 137 154 160 |
| | | | 193 196 242 273 316 328-329 334 |
| | | | 351 354 370-371 388 392 395-396 |
| | | | 401 406 411 415 432 435 439 448 |
| | | | 454-455 477 483 486-487 495 506 |
| | | | 509 514 518 523-524 526 529 531 |
| | | | 534 537-538 540 544 548 566 568 |
| | | | 571 573 579 587-588 591 594 602 |
| | | | 621 641 645 686 713 723 |
| adult liver | Invitrogen | ALV002 | 3 24 27 56-57 65-66 71 79 92 97 |
| | | | 106 134 140 164 192 200 214 220 |
| | | | 232 240 242 271-272 291 313 316 |
| | | | 328 347 349-350 353 355 357 368-369 |
| | | | 371-372 378-379 381-382 385 |
| | | | 397 430 435 448 457 459 471-472 |
| | | | 475 485 487 502 505-506 511 520 |
| | | | 530-531 533-534 537 540-541 543 |
| | | | 548 566 574-575 579 582 588 590 |
| | | | 612 623 640 648-649 681 687 689 |
| | | | 710 714 |
| adult ovary | Invitrogen | AOV001 | 3 10 14 28 54 56-58 62 65-66 68 73 |
| | | | 75 79 98 127 144 154 162 164-165 |
| | | | 172-174 182 186 188-189 192-196 |
| | | | 206 213 224 234-235 241 243 248 |
| | | | 253 261 273 275 289 314 316 321-322 |
| | | | 325-327 329-331 333-334 336-338 |
| | | | 340 343 345-348 354-357 367 |
| | | | 369 371-372 378 382 386 388 395-397 |
| | | | 399-402 404 407 411 415-416 |
| | | | 419-420 425 427 429 431 435-437 |
| | | | 441 444 451 453-459 465 468-470 |
| | | | 472-475 481 485 490 494 496 501 |
| | | | 503 509-510 513 517-518 522-524 |
| | | | 526 528-529 531-534 537-542 545-546 |
| | | | 548 552 554 556-557 559-560 |
| | | | 562-563 565 567-569 572-579 581-582 |
| | | | 584-588 590-591 593-598 602-604 |
| | | | 606 611-615 618 620-623 627 |
| | | | 629 631-632 635-638 643 647 652-654 |
| | | | 657 659 661-662 667 674-675 |
| | | | 677-678 682 684 689 693 695-698 |
| | | | 703 705-707 714 717-718 723 729 |
| | | | 731 738 |
| adult | Clontech | APL001 | 172 224 239 363 371 392 437 531 |
| placenta | | | 534 622 690 696 |
| placenta | Invitrogen | APL002 | 57 66 122 161 172 241 326 329 334 |
| | | | 369 388 407 427 429 436 459 464 |
| | | | 506 508 511 539 541 545 566 573 |
| | | | 575 590 597 637 648 690 |
| adult | GIBCO | ASP001 | 28 57 65 78 93 95 117 134 156-157 |
| spleen | | | 172 186 188 194 214 273 314 319 |
| | | | 331 334 338 344 354 371 374 392 |
| | | | 436 457 471-473 478-479 481 483 |
| | | | 515 526 528-529 541 548 557 559 |
| | | | 563 565 569 573 585-587 603 606 |
| | | | 613 615 618 621-622 627 632 634 |
| | | | 637 643 654 671 689 696-698 701 |
| | | | 712 739 |
| testis | GIBCO | ATS001 | 3 67 134 160 192 235 327 329 337 |
| | | | 342 371 375 378 380-381 396 399 |
| | | | 415 431 436 441 451 472 477-478 |
| | | | 483 486 494 496 503 522 524 526 |
| | | | 531 533-534 538 541-542 546 548 |
| | | | 557 568 573 577 579 581 584 594 |
| | | | 596 618 641 658 662 689 700 714 |
| | | | 729-730 |
| adult | Invitrogen | BLD001 | 28 57 112 161 164 172 192 194 250 |
| bladder | | | 334 354 370 397 404 487 513 526 |
| | | | 531 534 545 572 599 602 620 634 |
| | | | 651 659 672 689 713 725 |
| bone marrow | Clontech | BMD001 | 10-11 28 31 54 57 62 75 78-83 88 |
| | | | 131-133 135-137 141-143 157 159 |
| | | | 164 171-173 176-177 187-189 192 |
| | | | 195 200 202 205 207 218 225 282 |
| | | | 314-318 325 330 334-335 337 346-348 |
| | | | 367 369 372 378 383 386 388 |
| | | | 395 401 405 412-413 416 422 436 |
| | | | 442-443 447 449 455 465 472 475 |
| | | | 477 503 516 523 528-529 533-534 |
| | | | 539 545 551 556 559 563 565-567 |
| | | | 571 573-574 576 579-586 594 601-602 |
| | | | 606 613 620-623 628-629 634 |
| | | | 638 642-643 646 656 659 666 686 |
| | | | 689 691 696 698-699 703 705 714 |
| | | | 720 726 729 |
| bone marrow | Clontech | BMD002 | 2 15 23 35 49 54 57 59 78 81 114 |
| | | | 156-157 164 171-172 189-190 202 |
| | | | 223 240 325 334 346 357 367 379 |
| | | | 381-382 388 397 412 454 465 482 |
| | | | 490 509 516 526 535 537 563 566 |
| | | | 579 595 600 638 640-641 654-655 |
| | | | 676 689 714 |
| adult colon | Invitrogen | CLN001 | 48 79 94 138 162 167 189 333 368-369 |
| | | | 375 386 404 409 414 435-436 |
| | | | 455 470 525 541 548 553 567 603 |
| | | | 634 656 659 689 694 721 |
| adult | BioChain | CVX001 | 3 28 35 54 57 79 83 95 97 113 117 |
| cervix | | | 154 162 164 172 176 220 235 248-249 |
| | | | 249 321 327 329 333 338 346 348 |
| | | | 354 356 362 367-368 371 374-375 |
| | | | 378-379 386 388-389 395 401-402 |
| | | | 404 407 420 429 431 437 443 451 |
| | | | 459 468 475 477 479 483 485 490 |
| | | | 493-494 496 506 508 511 517 526 |
| | | | 528 531 534 544 550 552 559 566 |
| | | | 569 571-573 575-576 581-583 588 |
| | | | 590 593-594 604 606 614 622 628 |
| | | | 631-635 639 661-662 675 689 692 |
| | | | 695 715 718 738 |
| endothelial | Strategene | EDT001 | 3 28 31 39 54 58 65-66 79 89 144 |
| cells | | | 160 173 187 189 191 193 197-199 |
| | | | 207 220 230 267 273 314 324 326 |
| | | | 329-331 336 347 354 369 372 378-379 |
| | | | 384 386 388 391-394 396-397 |
| | | | 399 401 407 420 422 429 431-432 |
| | | | 435-437 444 449 451 455 459 465 |
| | | | 472 474-475 481-482 486 490 499-501 |
| | | | 503 506 511 513 515-517 520 |
| | | | 522-524 528 531-534 538-539 541 |
| | | | 545-546 548 550 552 557 559-560 |
| | | | 563 565 567 569 571 573 577 579-580 |
| | | | 583-584 587-590 593-594 596-597 |
| | | | 599 602 611 614-615 618 620-621 |
| | | | 624 630 632-634 637-638 642-643 |
| | | | 647-648 651 675 677 680 682 |
| | | | 694 696-698 703 708 714 719 724-725 |
| | | | 728-730 734 |
| Genomic | Genomic | EPM001 | 38 41-45 118-121 164 198 292-312 |
| clones from | DNA from | | |
| the short | Genetic | | |
| arm of | Research | | |
| chromosome 8 | | | |
| Genomic | Genomic | EPM003 | 43 164 295 |
| clones from | DNA from | | |
| the short | Genetic | | |
| arm of | Research | | |
| chromosome 8 | | | |
| Genomic | Genomic | EPM004 | 121 164 306 482 |
| clones from | DNA from | | |
| the short | Genetic | | |
| arm of | Research | | |
| chromosome 8 | | | |
| Genomic | Genomic | EPM006 | 293 |
| clones from | DNA from | | |
| the short | Genetic | | |
| arm of | Research | | |
| chromosome 8 | | | |
| esophagus | BioChain | ESO002 | 513 526 |
| fetal brain | Clontech | FBR001 | 57 468 563 634 |
| fetal brain | Clontech | FBR004 | 162 186 254 265 491 582 |
| fetal brain | Clontech | FBR006 | 1-2 5-6 11-12 22-23 49 57 62 73 94 |
| | | | 103 114 162 164 172 189 193 203 |
| | | | 218 240 244 251-252 259 279 330-331 |
| | | | 334-335 346-347 351 367 378 |
| | | | 386 388-389 399 413 420 422 424 |
| | | | 434 442 444 448 465 468 470 472-473 |
| | | | 490 496 501 503-504 511 520 |
| | | | 524 528 532-533 539 544-546 548 |
| | | | 551 553 563 571 573 576 587 591 |
| | | | 601 613 615-616 620-621 628 634 |
| | | | 641 644 648 653 657 662 672-673 |
| | | | 689 691 698 706 714 718 725-728 |
| | | | 733 735-739 |
| fetal brain | Clontech | FBRs03 | 444 587 |
| fetal brain | Invitrogen | FBT002 | 17 66 157 162 164 186 190 193 250 |
| | | | 270 324 331 334-335 338 346 354-355 |
| | | | 374 382 389-390 426 429-430 |
| | | | 437 442 453 467 471 475 481 485 |
| | | | 491 507-508 513-514 526 528 532 |
| | | | 540 544 548 550 552-553 557-558 |
| | | | 563 565-566 590 593 602 612 615 |
| | | | 637 641 648 654 662 672 676 692 |
| | | | 703 |
| fetal heart | Invitrogen | FHR001 | 57 75 164 547 |
| fetal | Clontech | FKD001 | 57 164 172 179 188 194 208 218 230 |
| kidney | | | 240 250 330 334 369 388 401 413 |
| | | | 439 454 465 529 546 550 573 576 |
| | | | 581 583 594-596 602 634 648 667 |
| | | | 676 689 698 706 |
| fetal | Clontech | FKD002 | 2 560 |
| kidney | | | |
| fetal | Invitrogen | FKD007 | 565 596-597 |
| kidney | | | |
| fetal lung | Clontech | FLG001 | 75 164 355 386 428 455 513 524 528 |
| | | | 631 689 |
| fetal lung | Invitrogen | FLG003 | 30 157 162 169 188 243 253 256 283 |
| | | | 330 392 400-401 404 407 424 428 |
| | | | 435-436 479 506 508 520 530-531 |
| | | | 534 572 578 584 602 611 613 631 |
| | | | 654 658 662 676 689 701 716 |
| fetal lung | Clontech | FLG004 | 371 |
| fetal | Columbia | FLS001 | 2-3 5 26 29 31 35 48 54-58 60 62 |
| liver- | University | | 65 67 70 74-77 79-80 84-87 89 92 |
| spleen | | | 96 98-100 104 117 122-130 138 140 |
| | | | 144-158 160 162 164 172-173 185-186 |
| | | | 188-189 192-194 196 199-200 |
| | | | 207 214 218-219 237-238 241 269 |
| | | | 273 280 282 314-316 318-322 324 |
| | | | 327 329-331 334-335 337 340 345 |
| | | | 348-350 354-358 363-364 367-371 |
| | | | 373 375 377-380 382-383 385-386 |
| | | | 388 394-396 399 402 409 411-412 |
| | | | 418 420-422 424 427 431 435-437 |
| | | | 440 442 448-451 453 455 459 461 |
| | | | 464-465 470 472-473 475 477-478 |
| | | | 480-485 488-490 501 503 505-506 |
| | | | 509 511-513 515-518 520 522-524 |
| | | | 526-534 538-539 541 543-547 549-550 |
| | | | 552-553 556-557 559-564 566-567 |
| | | | 569 571 573 576 578-580 582-587 |
| | | | 589 591-594 596-597 599-600 |
| | | | 602 611-615 618 620-625 627-628 |
| | | | 631-636 638 641-642 646 648 651 |
| | | | 659-660 662-664 667-668 675-678 |
| | | | 680-681 684 689-690 696-698 709 |
| | | | 714 723 738 |
| fetal | Columbia | FLS002 | 15 31-32 39-40 47-49 52 56 60 65 |
| liver- | University | | 69 72 75 78 84 97-98 100 104 115 |
| spleen | | | 123 138 140 144 146 152-153 157 |
| | | | 161 164 172-173 182 188 194 196 |
| | | | 199 220 241-242 246 249 253 255 |
| | | | 266 273-275 280-281 288-291 314-316 |
| | | | 318-319 321-322 324 329-331 |
| | | | 336-339 343 347-350 353-354 357-358 |
| | | | 363 367 369-370 372 374 378-380 |
| | | | 382-383 386 388-389 393-397 |
| | | | 399 405 407 409-410 412 421 424 |
| | | | 432 435 439 448 450-451 453-457 |
| | | | 459 461 464-465 470 472-475 477 |
| | | | 479-481 483 485 488 490 497 501 |
| | | | 503 506 509 511-513 516-518 520 |
| | | | 524 527-528 531-532 534 539 541-546 |
| | | | 556 559-560 565-566 569 571 |
| | | | 574 576 579 582-586 588 590 597-599 |
| | | | 602-604 606 615 618 620-621 |
| | | | 623 625 627 632-634 639 641 644 |
| | | | 648 666-668 675-676 681 684 689-690 |
| | | | 696-697 701 703 714 719 723 |
| | | | 734-735 |
| fetal | Columbia | FLS003 | 60 79 157 190 690 |
| liver- | University | | |
| spleen | | | |
| fetal liver | Invitrogen | FLV001 | 3 27 35 48 50 56-57 66 75 92 94 |
| | | | 105 157 161 164 176 189 209 220 |
| | | | 243 272 324 328 333 335 353 369-370 |
| | | | 381 392 396 429-430 435 439-440 |
| | | | 442 444 465 471 483 487 502 |
| | | | 506 513-514 519 534-535 537 548 |
| | | | 554 566 568 576-577 580 582 590 |
| | | | 613 621 645 648-649 689 |
| fetal liver | Clontech | FLV002 | 343 |
| fetal | Invitrogen | FMS001 | 51 79 97 108-110 166 194 196 266 |
| muscle | | | 341 352 380 389 402 407 444 464 |
| | | | 475 501 513 524 546 552 554 560 |
| | | | 570 572 598 605 628 634 649 675 |
| | | | 703-704 714 737 |
| fetal | Invitrogen | FMS002 | 524 |
| muscle | | | |
| fetal skin | Invitrogen | FSK001 | 31 33 35 48 57 63 67 75 112-114 |
| | | | 117 157 162 164 172 178 180 188 |
| | | | 196 220 243 254 319 324 328 330 |
| | | | 333-334 367 369 371 375 379-383 |
| | | | 386 388-389 400 404 407 412 419-420 |
| | | | 429 444 455 472-473 491 499 |
| | | | 503 508 511 514 517 522-524 529 |
| | | | 531 534 537 540 542 547 552 554 |
| | | | 556-557 560 563 565 567 571-572 |
| | | | 574 576 579 590 596 599 616 621 |
| | | | 625 627 631-632 634 639-640 648 |
| | | | 653-654 662 689 708 714 |
| fetal skin | Invitrogen | FSK002 | 501 537 |
| fetal | BioChain | FSP001 | 465 729 |
| spleen | | | |
| umbilical | BioChain | FUC001 | 27-28 35 57 68 83 105 136 157 159-160 |
| cord | | | 164 188 191 225 279 315-316 |
| | | | 321 328 334 363 367 369 378-379 |
| | | | 383 386 388-389 392 397 406-407 |
| | | | 413 415-416 427 440 449 455 458 |
| | | | 461 464-465 468 473-475 479 485-486 |
| | | | 488 490 496 514 517 522 524 |
| | | | 526 528-529 531 533-534 538 540 |
| | | | 546 550 552 556-558 572 582 584-585 |
| | | | 587-588 594-597 602 606 613 |
| | | | 616 618-619 631 634 637 651 689 |
| | | | 696 698 706 729 |
| fetal brain | GIBCO | HFB001 | 3 5 22 26 46 53 66 73 94 117 134 |
| | | | 139 164 172-173 188-189 212 215 |
| | | | 230-231 248 251 262 288-289 316 |
| | | | 325 329-331 334 337-338 348 352 |
| | | | 365-367 369 371 377-379 385-386 |
| | | | 388 392 394 396 400 403 420 422 |
| | | | 429 437 444-446 449 451 455 459 |
| | | | 461-463 466-468 472-473 475 477 |
| | | | 481 483 485-486 488 490-491 496 |
| | | | 503-504 506 513 523-524 529 532-533 |
| | | | 539-541 545 548 550 552 557-560 |
| | | | 563 565-566 569 571 576-577 |
| | | | 579-580 583-584 586 590 593-594 |
| | | | 596-599 601-602 604 606 611 613 |
| | | | 615 618 621-623 627-628 634-635 |
| | | | 637 641 643 647 662 664-665 667 |
| | | | 675 677 680 689 695-697 703 726 |
| macrophage | Invitrogen | HMP001 | 97 518 532 569 |
| infant | Columbia | IB2002 | 28 46 56-57 59 67 75 78 109 117 |
| brain | University | | 122 129 144 157 162 164-165 172 |
| | | | 176 180 190 193 212 220 226 236-237 |
| | | | 251 261-262 316 318 324 328-330 |
| | | | 334-335 337 340 354-356 361 |
| | | | 364-365 367 369 371-373 377-380 |
| | | | 382 385-386 389 392 395 397 400 |
| | | | 411 416 421-422 429 432 436 438 |
| | | | 444 448 451 456 464-465 469 471-475 |
| | | | 484 486 496 504-506 511 520 |
| | | | 524 526 529 531 533-534 537-540 |
| | | | 544-546 548 553 556 558 562 565 |
| | | | 567 576 579-580 582 584 586 589-590 |
| | | | 593 597-598 602 613-614 618 |
| | | | 620-621 627-628 632 634 636 641 |
| | | | 650 654 659 662 667 683 689 721 |
| | | | 730 |
| infant | Columbia | IB2003 | 46 54 75 109 156 164 220 244 251 |
| brain | University | | 314 324-325 331 335 340 361-362 |
| | | | 367 369 377-379 400 408 438 442 |
| | | | 456 460 464 469 472 496 506 523-524 |
| | | | 526 529 538 540 544-545 547 |
| | | | 558 560-562 565 567 569 579 584 |
| | | | 598 602 613 615 621 627 632 634 |
| | | | 637 639 650 738 |
| infant | Columbia | IBM002 | 262 340 432 436 438 472 531 534 |
| brain | University | | 569 613 634 |
| infant | Columbia | IBS001 | 162 231 283 331 369 385 438 444 |
| brain | University | | 472 506 513 523 531 534 580 615 |
| | | | 636 689 |
| lung, | Strategene | LFB001 | 28 54 57 65 172 188 233 321 331 |
| fibroblast | | | 340 347 367 369 378-379 388 401 |
| | | | 451 459 475 479 503 511 522 524 |
| | | | 532 534 559-560 573 580 583 587 |
| | | | 597 615 632 634 638 686 689 708 |
| lung tumor | Invitrogen | LGT002 | 3 7 21 24 26 28 31 54 56-57 62-63 |
| | | | 66 92-93 101 109 112 162 164 171-172 |
| | | | 176 183 188-189 192-193 196 |
| | | | 201-202 223 230 235 259 273-274 |
| | | | 316 321 329-331 333-334 338 345 |
| | | | 347-348 356 367 369 371-372 378-379 |
| | | | 381-382 386 388-390 396 399-404 |
| | | | 406 409 416 424-425 427 429 |
| | | | 432 436-437 439 451 455-456 459 |
| | | | 464-465 467 473 475 484-486 490 |
| | | | 499 502-503 506 508 511 513-514 |
| | | | 517-518 522 524 526 528 531-532 |
| | | | 534-535 538-539 541 543-546 553 |
| | | | 557-559 563 567-568 571 573 575-576 |
| | | | 579-580 585-588 590-591 593-594 |
| | | | 598 601-604 609 611-613 615 |
| | | | 621 627-628 631-632 636-637 645 |
| | | | 648 651-652 654 662 667 672 677 |
| | | | 681 683 689 698 701-702 714 718 |
| | | | 724 726 729 734 |
| lymphocytes | ATCC | LPC001 | 4 31-32 35 57 65-66 70 110 116 156 |
| | | | 162 164 230 243 250 282 287 326 |
| | | | 328-330 334 336 346-347 359 378 |
| | | | 386 388 397 407 414 416 419 472 |
| | | | 497 520 525 539 545 549 551 582 |
| | | | 590 606 615 618 621 631 634 686 |
| | | | 692 698 701 714 |
| leukocyte | GIBCO | LUC001 | 4 7 9-11 23 28 31 35 39 54 65 75-76 |
| | | | 79 90 97 110 117 134 152 157 |
| | | | 159 162 164-167 171 173 176 188 |
| | | | 193 199 204 207 220 244 253 255 |
| | | | 314 316 318 321 324 326 329-330 |
| | | | 337-339 346-347 352 354 356 367 |
| | | | 369 371 378-379 382 388-389 392 |
| | | | 396-397 400-402 405 415-416 420 |
| | | | 422 429 432 435-436 443-444 449 |
| | | | 454-455 457-459 465 479 481-486 |
| | | | 491 497 501 503-504 506 508 511 |
| | | | 514 516 520 523-525 529 532-533 |
| | | | 535 538-539 545 548 552-554 556 |
| | | | 559-560 562-563 565-566 569 571-573 |
| | | | 576 579 581 585-587 590 593-594 |
| | | | 598 600-602 604 606-609 613-614 |
| | | | 618 620-622 624 627 630 632-634 |
| | | | 636 638 643 645 660-662 667 |
| | | | 678 682 684 686 689 691 693 696-698 |
| | | | 714 726 |
| leukocyte | Clontech | LUC003 | 11 54 97 152 164 330 479 546 564-565 |
| | | | 593 613 627 634 646 696 729 |
| melanoma | Clontech | MEL004 | 2 57 67 79 164 171-173 188 193 196 |
| from cell | | | 232 321 337 341 346 367 379-380 |
| line ATCC | | | 388 407 427 454 472 477 482 501 |
| #CRL 1424 | | | 520 539 545 552 556 579 588 593 |
| | | | 598 611 621 631 648 665 714 730 |
| mammary | Invitrogen | MMG001 | 3 20-21 29 31 54 56-57 63-66 79 94 |
| gland | | | 109 112-113 117 122 125 138 141 |
| | | | 154 160 162 164 172 176 186 189 |
| | | | 192 204 214 220-221 232 238 251 |
| | | | 255 257 273 276-278 324 326 328-331 |
| | | | 333 335 337 341-343 347 354-355 |
| | | | 357 367-371 374-375 379 382-386 |
| | | | 388-392 397 399-400 404 406-408 |
| | | | 410-411 425 431 435-436 444 |
| | | | 451 455 457 459 461 464-465 470-471 |
| | | | 475 479 483 485 487-488 491 |
| | | | 501 506-508 511 513-519 523-524 |
| | | | 526 529 531-532 534-535 537 539-540 |
| | | | 542-545 552-554 557-560 563 |
| | | | 566 569 572 577 580 584 587-588 |
| | | | 590 597-598 602 604-605 609 611 |
| | | | 613 615 624 627 631-634 637 639-640 |
| | | | 643 648-649 654 664 669-670 |
| | | | 672-673 676-679 681 689 691-695 |
| | | | 697-698 706 714 731 734 737 |
| induced | Strategene | NTD001 | 36 57 164 284 388 397 420 481 485 |
| neuron | | | 501 524 528-529 539 542 545 560 |
| cells | | | 571 579 582 595 602 620 637 654 |
| | | | 667 689 730 |
| retinoid | Strategene | NTR001 | 524 584 693 |
| acid | | | |
| induced | | | |
| neuronal | | | |
| cells | | | |
| neuronal | Strategene | NTU001 | 36-38 120 204 331 351 354 357 386 |
| cells | | | 388 399 411 442 459 516 533 539 |
| | | | 545 565 586 606 615 621 637-638 |
| | | | 642 646 648 714 730 |
| placenta | Clontech | PLA003 | 503 579 690 |
| prostate | Clontech | PRT001 | 15 40 65 164 187 207 229 337 348 |
| | | | 367 375 377-378 395 406 416 428 |
| | | | 458 468 476 511 524 526 531 534 |
| | | | 538 555 559 563 576 584 597 613 |
| | | | 622 624 631 642 667 672 677 684 |
| | | | 724 734 |
| rectum | Invitrogen | REC001 | 57 67 164 260 331 343 370-371 380 |
| | | | 382 384 404 409 436 444 475 485 |
| | | | 498 513 524 526 540 542 552 554 |
| | | | 581 615 619 624 627 634 654 659 |
| | | | 671 689 714 |
| salivary | Clontech | SAL001 | 21 84 106-107 152 179 238 246 255 |
| gland | | | 273 287 371 378 383 401 407 420 |
| | | | 455 475 477 509 512 515 521 541 |
| | | | 548 565 570-571 573-574 589 606 |
| | | | 628 634 636 652 689 703 738 |
| skin | ATCC | SFB002 | 192 |
| fibroblast | | | |
| skin | ATCC | SFB003 | 464 |
| fibroblast | | | |
| small | Clontech | SIN001 | 57 66 71 98 116 150 164 172 327 |
| intestine | | | 336 343 362 367 379 388 397 401-402 |
| | | | 417 429 433 436 496 526 528 |
| | | | 533 590 602 620 631 634 667 678 |
| | | | 711 |
| skeletal | Clontech | SKM001 | 3 57 66 101 164 172 256 266 325 |
| muscle | | | 379 385 449 468 485 487 518 552 |
| | | | 554 566-567 570 582 584 590 606 |
| | | | 611 628 631 738 |
| spinal cord | Clontech | SPC001 | 10 54 57 66 75 100 102 114 144 164 |
| | | | 175 193 199 215-216 325 334 337 |
| | | | 367 370 380 385-386 406 411-413 |
| | | | 419 429 466 470 486 518 526 529 |
| | | | 531 534 574 579 585 587 590 604 |
| | | | 620-621 631-632 634 642 644 648 |
| | | | 659 688-689 691 693 695 |
| adult | clontech | SPLc01 | 478 572 |
| spleen | | | |
| stomach | Clontech | STO001 | 26 90 164 218 358 369 386 468 475 |
| | | | 485 526 532 569 576 579 581 586 |
| | | | 603 631 634 677 682 689 |
| thalamus | Clontech | THA002 | 17 31 57 66 109 127 164 217-218 |
| | | | 262 315-316 324 330 357 369 386 |
| | | | 388 400 406 435 456 459 464 468-469 |
| | | | 515-516 537 540-541 556 566 |
| | | | 574 590 611 622 631 634 644 648 |
| | | | 656 677-678 680 |
| thymus | Clontech | THM001 | 6 15 26 54 79 164 172 187 193 201 |
| | | | 264 291 315 329 331 351 356 367 |
| | | | 397-398 401 407 412 424 427 429 |
| | | | 435-436 443 451 474 478 482 549 |
| | | | 563 565 567 569 576 578 581-582 |
| | | | 610 615 621 631-632 634 648 662 |
| | | | 667 669 679 689 693 696 |
| thymus | Clontech | THMc02 | 3-6 8 11 16 18 34 58-59 67 132 149 |
| | | | 162 164 167 172-173 186 188-189 |
| | | | 193 200 203 216 223 232 239 255 |
| | | | 263 265 319-320 331 333-334 355 |
| | | | 359 370 373 377-380 382 387-390 |
| | | | 393 395 398-399 402 404 408 420 |
| | | | 427 434 436 467 475-476 503 508 |
| | | | 518 524 526 532 540 560 563 565 |
| | | | 571-572 576-577 579 582 598 601 |
| | | | 603 612-613 615 621 627 632 634 |
| | | | 639 641 648 651 657 659 662 672 |
| | | | 677-678 684-686 689 696 699 706 |
| | | | 714-716 722 726-729 732 |
| thyroid | Clontech | THR001 | 5 29-30 40 54 57 66 72 79 117 144 |
| gland | | | 160 164 166 170 172 176 183 188-189 |
| | | | 208-209 219 230 285-286 314 |
| | | | 318 327 331 335 338 344 347 354 |
| | | | 363 367 375 377-380 382 384-386 |
| | | | 388 393 397 399 401-403 419 422 |
| | | | 429 436 442 444 451 456 458-461 |
| | | | 464 467-468 470 472-473 476-477 |
| | | | 481 488 494 503 508-509 511 516 |
| | | | 519-521 524 528-529 533 537-538 |
| | | | 543 548 557 559-560 563 565-566 |
| | | | 571-574 576 582 585 587 590-591 |
| | | | 593-594 596-597 606 614-615 620-621 |
| | | | 623-624 627 631-634 640 650-651 |
| | | | 653 662 667 669-670 675 679 |
| | | | 689 708 712 714 |
| trachea | Clontech | TRC001 | 156 164 171 240 375 378 390 400 |
| | | | 422 468 484 565 574 581 585 587 |
| | | | 631 654 689 714 |
| uterus | Clontech | UTR001 | 65 77 79 101 164 220 367 369 451 |
| | | | 468 526 530 533 548 554 559 562 |
| | | | 568 573 582 594 637 648 689 |

[0381] TABLE 2
Nearest Neighbor Results

| | SEQ | | | | | |
|---|---|---|---|---|---|---|
| | ID | | | | | |
| | NO: | | | | | |
| | in | | | | Simth- | |
| SEQ | USSN | | | | Water | |
| ID | 09/ | Accession | | | man | % |
| NO: | 488,725 | No. | Species | Description | Score | Identity |
| 1 | 1000 | gi7021484 | Mus Musculus | secretory | 567 | 85 |
| | | | | carrier | | |
| | | | | membrane | | |
| | | | | protein 4 | | |
| 2 | 10017 | R06463 | Homo sapiens | Derived | 848 | 100 |
| | | | | protein of | | |
| | | | | clone ICA13 | | |
| | | | | (ATCC 40553). | | |
| 3 | 10020 | gi1065967 | Caenorhabditis | similar to | 325 | 36 |
| | | | elegans | other protein | | |
| | | | | phosphatases | | |
| | | | | 1, 2A and 2B | | |
| 4 | 10024 | G03460 | Homo sapiens | Human | 439 | 98 |
| | | | | secreted | | |
| | | | | protein, | | |
| 5 | 10032 | Y12505 | Homo sapiens | Human 5′ EST | 136 | 87 |
| | | | | secreted | | |
| | | | | protein | | |
| 6 | 10042 | Y29511 | Homo sapiens | Human lung | 701 | 100 |
| | | | | tumour protein | | |
| | | | | SAL-25 1st | | |
| | | | | predicted | | |
| | | | | amino acid | | |
| | | | | sequence. | | |
| 7 | 1006 | Y92324 | Homo sapiens | Human alpha- | 763 | 100 |
| | | | | 2-delta-D | | |
| | | | | polypeptide | | |
| | | | | from splice | | |
| | | | | variant 1. | | |
| 8 | 10064 | gi4589375 | Homo sapiens | Gab2 | 425 | 58 |
| 9 | 1007 | gi7018398 | Homo sapiens | | 151 | 75 |
| 10 | 1008 | gi896065 | Homo sapiens | protein that | 1226 | 99 |
| | | | | is immuno- | | |
| | | | | reactive with | | |
| | | | | anti-PTH | | |
| | | | | polyclonal | | |
| | | | | antibodies | | |
| 11 | 10088 | gi3779244 | Homo sapiens | Metalloprotease 1 | 1512 | 98 |
| 12 | 10089 | gi2947232 | Homo sapiens | membrane | 523 | 100 |
| | | | | associated | | |
| | | | | guanylate | | |
| | | | | kinase 2 | | |
| 13 | 10091 | gi3347863 | Mus Musculus | cAMP-specific | 223 | 54 |
| | | | | cyclic | | |
| | | | | nucleotide | | |
| | | | | phosphodiesterase | | |
| | | | | PDE8; | | |
| | | | | MMPDE8 | | |
| 14 | 10098 | gi6979311 | Homo sapiens | cysteine-rich | 1068 | 100 |
| | | | | repeat- | | |
| | | | | containing | | |
| | | | | protein S52 | | |
| | | | | precursor | | |
| 15 | 10102 | G01395 | Homo sapiens | Human | 297 | 88 |
| | | | | secreted | | |
| | | | | protein, | | |
| 16 | 10103 | gi854733 | Rattus | casein kinase 1 | 293 | 84 |
| | | | norvegicus | gamma 1 | | |
| | | | | isoform | | |
| 17 | 10104 | Y60017 | Homo sapiens | Human | 154 | 100 |
| | | | | endometrium | | |
| | | | | tumour EST | | |
| | | | | encoded | | |
| | | | | protein 77. | | |
| 18 | 10108 | G03290 | Homo sapiens | Human | 215 | 97 |
| | | | | secreted | | |
| | | | | protein, | | |
| 19 | 10110 | gi7292299 | Drosophila | CG1271 gene | 208 | 46 |
| | | | melanogaster | product | | |
| 20 | 10111 | gi4512334 | Rattus | Ca/calmodulin- | 822 | 89 |
| | | | norvegicus | dependent | | |
| | | | | protein kinase | | |
| | | | | kinase alpha, | | |
| | | | | CaM-kinase | | |
| | | | | kinase alpha | | |
| 21 | 10113 | Y41694 | Homo sapiens | Human PRO382 | 633 | 97 |
| | | | | protein | | |
| | | | | sequence. | | |
| 22 | 10114 | gi349075 | Rattus | calmodulin- | 531 | 99 |
| | | | norvegicus | binding | | |
| | | | | protein | | |
| 23 | 10116 | gi162981 | Bos taurus | endozepine- | 937 | 87 |
| | | | | related | | |
| | | | | protein | | |
| | | | | precursor | | |
| 24 | 10121 | gi8979743 | Canis | Band4.1-like5 | 643 | 100 |
| | | | familiaris | protein | | |
| 25 | 10126 | Y99420 | Homo sapiens | Human PRO1486 | 607 | 100 |
| | | | | (UNQ755) amino | | |
| | | | | acid sequence | | |
| 26 | 1013 | gi804750 | Homo Sapiens | protein | 614 | 73 |
| | | | | tyrosine | | |
| | | | | phosphatase | | |
| 27 | 10136 | W02105 | Homo sapiens | Human L- | 1243 | 98 |
| | | | | asparaginase. | | |
| 28 | 10142 | Y35924 | Homo sapiens | Extended | 862 | 89 |
| | | | | human secreted | | |
| | | | | protein | | |
| | | | | sequence, | | |
| 29 | 10148 | gi3334982 | Homo sapiens | R27216_1 | 329 | 98 |
| 30 | 1015 | G02485 | Homo sapiens | Human | 120 | 72 |
| | | | | secreted | | |
| | | | | protein, | | |
| 31 | 10154 | gi10798804 | Homo sapiens | sperm antigen | 2607 | 98 |
| 32 | 10175 | Y96864 | Homo sapiens | SEQ. ID. 37 | 536 | 100 |
| | | | | from | | |
| | | | | WO0034474. | | |
| 33 | 10196 | gi553621 | Homo sapiens | profilaggrin | 346 | 39 |
| 34 | 10198 | gi1419016 | Mus Musculus | odorant | 281 | 53 |
| | | | | receptor | | |
| 35 | 10200 | Y57903 | Homo sapiens | Human | 448 | 100 |
| | | | | transmembrane | | |
| | | | | protein HTMPN- | | |
| | | | | 27. | | |
| 36 | 10208 | gi4062492 | Escherichia | | 505 | 100 |
| | | | coli | | | |
| 37 | 10212 | gi882529 | Escherichia | ORF_f141 | 625 | 96 |
| | | | coli | | | |
| 38 | 10213 | gi4062778 | Escherichia | Hypothetical | 773 | 98 |
| | | | coli | protein HI0761 | | |
| 39 | 10214 | gi6693832 | Rattus | opioid growth | 661 | 44 |
| | | | norvegicus | factor | | |
| | | | | receptor | | |
| 40 | 10227 | G01360 | Homo sapiens | Human | 384 | 100 |
| | | | | secreted | | |
| | | | | protein, | | |
| 41 | 10236 | gi1651257 | Escherichia | | 373 | 100 |
| | | | coli | | | |
| 42 | 10241 | gi2769262 | Escherichia | catabolite | 178 | 96 |
| | | | coli | gene activator | | |
| | | | | protein | | |
| 43 | 10245 | gi1789539 | Escherichia | orf, | 679 | 98 |
| | | | coli | hypothetical | | |
| | | | | protein | | |
| 44 | 10246 | gi882492 | Escherichia | ORF_o179 | 488 | 97 |
| | | | coli | | | |
| 45 | 10247 | gi1742149 | Escherichia | Sn-glycerol- | 323 | 100 |
| | | | coli | 3-phosphate | | |
| | | | | transport | | |
| | | | | system | | |
| | | | | permease | | |
| | | | | protein UgpA. | | |
| 46 | 10282 | Y29817 | Homo sapiens | Human synapse | 521 | 96 |
| | | | | related | | |
| | | | | glycoprotein 2. | | |
| 47 | 1031 | gi6435130 | Mus Musculus | putative E1-E2 | 990 | 86 |
| | | | | ATPase | | |
| 48 | 1040 | gi854124 | Homo sapiens | Human giant | 471 | 63 |
| | | | | larvae | | |
| | | | | Homologue | | |
| 49 | 1043 | gi3882285 | Homo sapiens | KIAA0782 | 154 | 61 |
| | | | | protein | | |
| 50 | 1051 | gi178216 | Homo sapiens | anion | 172 | 100 |
| | | | | exchange | | |
| | | | | protein 1 | | |
| 51 | 1053 | Y76748 | Homo sapiens | Human protein | 180 | 92 |
| | | | | kinase | | |
| | | | | Homologue, | | |
| | | | | PKH-1. | | |
| 52 | 1062 | gi965014 | Mus Musculus | ADAM 4 | 492 | 65 |
| | | | | protein | | |
| | | | | precursor | | |
| 53 | 1063 | gi2393880 | Drosophila | A-kinase | 580 | 60 |
| | | | melanogaster | anchor protein | | |
| | | | | DAKAP550 | | |
| 54 | 1066 | gi2746788 | Caenorhabditis | contains | 607 | 35 |
| | | | elegans | similarity to | | |
| | | | | transacylases | | |
| 55 | 107 | G00357 | Homo sapiens | Human | 183 | 77 |
| | | | | secreted | | |
| | | | | protein, | | |
| 56 | 1071 | gi9105937 | Xylella | Acetylglutamate | 505 | 36 |
| | | | fastidiosa | kinase | | |
| 57 | 1085 | R95913 | Homo sapiens | Neural thread | 257 | 55 |
| | | | | protein. | | |
| 58 | 1086 | Y76332 | Homo sapiens | Fragment of | 387 | 58 |
| | | | | human secreted | | |
| | | | | protein | | |
| | | | | encoded by | | |
| | | | | gene 38. | | |
| 59 | 1088 | gi4589642 | Homo sapiens | KIAA0999 | 873 | 99 |
| | | | | protein | | |
| 60 | 109 | gi763431 | Homo sapiens | KIAA0999 | 360 | 85 |
| | | | | protein | | |
| 61 | 1095 | Y94907 | Homo sapiens | Human | 701 | 97 |
| | | | | secreted | | |
| | | | | protein clone | | |
| | | | | ca106_19x | | |
| | | | | protein | | |
| | | | | sequence | | |
| 62 | 1102 | Y07096 | Homo sapiens | Colon cancer | 1982 | 100 |
| | | | | associated | | |
| | | | | antigen | | |
| | | | | precursor | | |
| | | | | sequence. | | |
| 63 | 1105 | Y84907 | Homo sapiens | A human | 983 | 91 |
| | | | | proliferation | | |
| | | | | and apoptosis | | |
| | | | | related | | |
| | | | | protein. | | |
| 64 | 1108 | gi1398903 | Mus Musculus | Ca2+ dependent | 1307 | 89 |
| | | | | activator | | |
| | | | | protein for | | |
| | | | | secretion | | |
| 65 | 1109 | Y91524 | Homo sapiens | Human | 2400 | 99 |
| | | | | secreted | | |
| | | | | protein | | |
| | | | | sequence | | |
| | | | | encoded by | | |
| | | | | gene 74 | | |
| 66 | 1113 | gi1657462 | Sus scrofa | calcium/calmodulin- | 1348 | 94 |
| | | | | dependent | | |
| | | | | protein kinase | | |
| | | | | II isoform | | |
| | | | | gamma-E | | |
| 67 | 1117 | Y32169 | Homo sapiens | Human growth- | 2831 | 97 |
| | | | | associated | | |
| | | | | protease | | |
| | | | | inhibitor | | |
| | | | | heavy chain | | |
| | | | | precursor. | | |
| 68 | 1118 | gi3063517 | Homo sapiens | | 1138 | 98 |
| 69 | 1125 | gi8248285 | Homo sapiens | sphingosine | 1290 | 98 |
| | | | | kinase type 2 | | |
| | | | | isoform | | |
| 70 | 1132 | Y94918 | Homo sapiens | Human | 437 | 59 |
| | | | | secreted | | |
| | | | | protein clone | | |
| | | | | dd504_18 | | |
| | | | | protein | | |
| | | | | sequence | | |
| 71 | 1143 | gi45806 | Homo sapiens | prepro-major | 209 | 40 |
| | | 77 | | basic protein | | |
| | | | | Homolog | | |
| 72 | 1146 | gi182395 | Homo sapiens | focal | 131 | 87 |
| | | | | adhesion | | |
| | | | | kinase | | |
| 73 | 1161 | W90962 | Homo sapiens | Human CSGP-2 | 931 | 100 |
| | | | | protein. | | |
| 74 | 117 | W69428 | Homo sapiens | Human | 159 | 93 |
| | | | | secreted | | |
| | | | | protein | | |
| | | | | bp537_4. | | |
| 75 | 1170 | gi34339 | Homo sapiens | | 586 | 87 |
| 76 | 1175 | gi7960243 | Homo sapiens | SNARE protein | 308 | 100 |
| | | | | kinase SNAK | | |
| 77 | 118 | gi5360093 | Homo sapiens | NY-REN-18 | 178 | 96 |
| | | | | antigen | | |
| 78 | 1183 | gi292037 | Homo sapiens | helix-loop- | 361 | 91 |
| | | | | helix | | |
| | | | | phosphoprotein | | |
| 79 | 1193 | gi1899186 | Rattus | polysialyltransferase | 171 | 76 |
| | | | norvegicus | | | |
| 80 | 1195 | gi1399462 | Homo sapiens | serine/threonine- | 208 | 71 |
| | | | | protein | | |
| | | | | kinase PRP4h | | |
| 81 | 1198 | gi181535 | Homo sapiens | defensin | 150 | 71 |
| | | | | precursor | | |
| 82 | 1201 | gi5668935 | Rattus | plasma | 244 | 73 |
| | | | norvegicus | membrane Ca2+ | | |
| | | | | ATPase isoform | | |
| | | | | 1 kb | | |
| 83 | 1207 | gi6224868 | Homo sapiens | TANK binding | 716 | 86 |
| | | | | kinase TBK1 | | |
| 84 | 1210 | gi179646 | Homo sapiens | complement | 242 | 61 |
| | | | | component Cls | | |
| 85 | 1211 | gi1483187 | Homo sapiens | | 296 | 65 |
| 86 | 1214 | gi7800638 | Streptococcus | PspA | 121 | 37 |
| | | | pneumoniae | | | |
| 87 | 123 | Y44810 | Homo sapiens | Human | 218 | 93 |
| | | | | Aspartic | | |
| | | | | Protease-2 | | |
| | | | | (NHAP-2). | | |
| 88 | 1259 | gi2116672 | Homo sapiens | EAR-1r | 128 | 70 |
| 89 | 1266 | gi7243125 | Homo sapiens | KIAA1372 | 403 | 53 |
| | | | | protein | | |
| 90 | 1270 | gi1289445 | Homo sapiens | diacylglycerol | 125 | 96 |
| | | | | kinase epsilon | | |
| | | | | DGK | | |
| 91 | 1290 | gi1429371 | Drosophila | ubiquitin- | 470 | 41 |
| | | | melanogaster | specific | | |
| | | | | protease | | |
| 92 | 1291 | Y66755 | Homo sapiens | Membrane-bound | 993 | 100 |
| | | | | protein | | |
| | | | | PRO1185. | | |
| 93 | 1296 | gi9652087 | Homo sapiens | scavenger | 1183 | 99 |
| | | | | receptor | | |
| | | | | cysteine-rich | | |
| | | | | type 1 protein | | |
| | | | | M160 | | |
| | | | | precursor | | |
| 94 | 1299 | gi7300398 | Drosophila | CG7683 gene | 397 | 40 |
| | | | melanogaster | product | | |
| 95 | 1317 | gi3695115 | Rattus | CL1AA | 216 | 100 |
| | | | norvegicus | | | |
| 96 | 132 | gi187171 | Homo sapiens | 12- | 176 | 97 |
| | | | | lipoxygenase | | |
| 97 | 1330 | Y12482 | Homo sapiens | Human 5′ EST | 65 | 44 |
| | | | | secreted | | |
| | | | | protein | | |
| 98 | 1336 | gi10798814 | Homo sapiens | MLTK-beta | 2366 | 99 |
| 99 | 135 | gi456090 | Homo sapiens | effector cell | 190 | 74 |
| | | | | protease | | |
| | | | | receptor 1 | | |
| 100 | 1356 | gi193057 | Mus Musculus | envelope | 131 | 36 |
| | | | | polyprotein | | |
| | | | | precursor | | |
| 101 | 1369 | gi458657 | Homo sapiens | glucocorticoid | 596 | 89 |
| | | | | receptor | | |
| | | | | alpha-2 | | |
| 102 | 1392 | gi8493519 | Mus Musculus | nuclear | 145 | 59 |
| | | | | localization | | |
| | | | | signal binding | | |
| | | | | protein | | |
| 103 | 1408 | gi3127051 | Rattus | potassium | 176 | 84 |
| | | | norvegicus | channel | | |
| | | | | regulatory | | |
| | | | | protein KChAP | | |
| 104 | 141 | gi6453613 | Mus Musculus | putative | 204 | 33 |
| | | | | protein kinase | | |
| 105 | 1424 | gi2982501 | Homo sapiens | neuropathy | 769 | 100 |
| | | | | target | | |
| | | | | esterase | | |
| 106 | 143 | W50033 | Homo sapiens | Human immunity | 1201 | 98 |
| | | | | related | | |
| | | | | factor. | | |
| 107 | 1431 | gi10644565 | Heterodera | hypothetical | 133 | 36 |
| | | | glycines | esophageal | | |
| | | | | gland cell | | |
| | | | | secretory | | |
| | | | | protein 10 | | |
| 108 | 1441 | gi3044086 | Myxococcus | unknown | 149 | 32 |
| | | | xanthus | | | |
| 109 | 1444 | gi7248381 | Homo sapiens | adaptor | 1615 | 97 |
| | | | | protein | | |
| | | | | p130Cas | | |
| 110 | 1447 | Y65168 | Homo sapiens | Human 5′ EST | 403 | 97 |
| | | | | related | | |
| | | | | polypeptide | | |
| 111 | 1457 | W19919 | Homo sapiens | Human Ksr-1 | 227 | 77 |
| | | | | (kinase | | |
| | | | | suppressor of | | |
| | | | | Ras). | | |
| 112 | 1471 | G02532 | Homo sapiens | Human | 97 | 59 |
| | | | | secreted | | |
| | | | | protein, | | |
| 113 | 1473 | gi6062874 | Homo sapiens | candidate | 581 | 100 |
| | | | | tumor | | |
| | | | | suppressor | | |
| | | | | protein DICE1 | | |
| 114 | 1474 | Y64896 | Homo sapiens | Human 5′ EST | 197 | 100 |
| | | | | related | | |
| | | | | polypeptide | | |
| 115 | 1483 | gi436218 | Homo sapiens | KIAA0037 | 295 | 76 |
| 116 | 1486 | gi5852834 | Homo sapiens | bridging | 133 | 64 |
| | | | | integrator-2 | | |
| 117 | 149 | gi3327162 | Homo sapiens | KIAA0674 | 2243 | 98 |
| | | | | protein | | |
| 118 | 1503 | gi1736785 | Escherichia | . | 1270 | 97 |
| | | | coli | | | |
| 119 | 1506 | gi4062298 | Escherichia | YhhI protein | 612 | 90 |
| | | | coli | | | |
| 120 | 1513 | gi4062346 | Escherichia | . | 556 | 94 |
| | | | coli | | | |
| 121 | 1514 | gi216609 | Escherichia | PhoQ protein | 661 | 90 |
| | | | coli | | | |
| 122 | 1523 | gi5712756 | Rattus | calcium | 1178 | 90 |
| | | | norvegicus | transporter | | |
| | | | | CaT1 | | |
| 123 | 1527 | gi1853980 | Mus Musculus | glucocorticoid | 171 | 84 |
| | | | | receptor | | |
| | | | | interacting | | |
| | | | | protein 1 | | |
| 124 | 1536 | Y17227 | Homo sapiens | Human | 452 | 100 |
| | | | | secreted | | |
| | | | | protein (clone | | |
| | | | | ya1-1). | | |
| 125 | 154 | gi8515090 | Pinus taeda | putative | 81 | 40 |
| | | | | arabinogalactan | | |
| | | | | protein | | |
| 126 | 1544 | gi3879933 | Caenorhabditis | Similarity to | 134 | 34 |
| | | | elegans | Xenopus F- | | |
| | | | | spondin | | |
| | | | | precursor (PIR | | |
| | | | | Acc. No. | | |
| | | | | comes from | | |
| | | | | this gene | | |
| 127 | 1554 | gi6523817 | Homo sapiens | S1R protein | 255 | 84 |
| 128 | 1555 | gi6635205 | Homo sapiens | beta- | 210 | 90 |
| | | | | ureidopropionase | | |
| 129 | 1556 | Y39286 | Homo sapiens | Phosphodiesterase | 161 | 61 |
| | | | | 10 (PDE10) | | |
| | | | | clone FB93a. | | |
| 130 | 1564 | gi8977945 | Streptomyces | putative | 231 | 45 |
| | | | coelicolor | secreted | | |
| | | | A3(2) | serine | | |
| | | | | protease | | |
| 131 | 1576 | gi3025828 | Rattus | signal | 183 | 97 |
| | | | norvegicus | transducer and | | |
| | | | | activator of | | |
| | | | | transcription 4 | | |
| 132 | 1578 | gi5106572 | Homo sapiens | transcriptional | 758 | 98 |
| | | | | activator | | |
| | | | | SRCAP | | |
| 133 | 1579 | gi8575527 | Homo sapiens | toll-like | 595 | 99 |
| | | | | receptor 8 | | |
| 134 | 158 | gi406058 | Mus Musculus | protein kinase | 168 | 70 |
| 135 | 1580 | gi63340 | Gallus gallus | c-Rmil | 231 | 90 |
| 136 | 1588 | gi2217931 | Homo sapiens | PKU-alpha | 127 | 92 |
| 137 | 1589 | gi1272422 | Mus Musculus | Phosphoinositide | 720 | 99 |
| | | | | 3-kinase | | |
| 138 | 159 | gi2224629 | Homo sapiens | KIAA0344 | 215 | 43 |
| 139 | 1600 | gi1016012 | Rattus | neural cell | 543 | 93 |
| | | | norvegicus | adhesion | | |
| | | | | protein BIG-2 | | |
| | | | | precursor | | |
| 140 | 161 | gi6649583 | Homo sapiens | kidney and | 1651 | 98 |
| | | | | liver proline | | |
| | | | | oxidase 1 | | |
| 141 | 1612 | gi406113 | Rattus | protein kinase I | 125 | 89 |
| | | | norvegicus | | | |
| 142 | 1615 | gi219992 | Homo sapiens | phSR2 | 150 | 78 |
| 143 | 1620 | gi5714636 | Homo sapiens | serine/threonine | 126 | 71 |
| | | | | protein | | |
| | | | | kinase Kp78 | | |
| | | | | splice variant | | |
| | | | | CTAK75a | | |
| 144 | 1644 | Y13352 | Homo sapiens | Amino acid | 2542 | 100 |
| | | | | sequence of | | |
| | | | | protein | | |
| | | | | PRO228. | | |
| 145 | 1647 | Y99444 | Homo sapiens | Human PRO1575 | 704 | 100 |
| | | | | (UNQ781) amino | | |
| | | | | acid sequence | | |
| 146 | 1650 | gi3789765 | Homo sapiens | transmembrane | 271 | 100 |
| | | | | receptor UNC5C | | |
| 147 | 1663 | W75258 | Homo sapiens | Fragment of | 163 | 96 |
| | | | | human secreted | | |
| | | | | protein | | |
| | | | | encoded by | | |
| | | | | gene 26. | | |
| 148 | 1665 | gi10432431 | Homo sapiens | secreted | 1428 | 99 |
| | | | | modular | | |
| | | | | calcium- | | |
| | | | | binding | | |
| | | | | protein | | |
| 149 | 1671 | gi6708169 | Mus Musculus | inositol | 169 | 97 |
| | | | | phosphatase | | |
| | | | | eSHIPD183 | | |
| 150 | 1672 | Y68773 | Homo sapiens | Amino acid | 1030 | 99 |
| | | | | sequence of a | | |
| | | | | human | | |
| | | | | phosphorylation | | |
| | | | | effector | | |
| | | | | PHSP-5. | | |
| 151 | 1678 | gi6063017 | Homo sapiens | tousled-like | 132 | 86 |
| | | | | kinase 1 | | |
| 152 | 1680 | gi3510603 | Homo sapiens | nuclear | 278 | 80 |
| | | | | receptor co- | | |
| | | | | repressor N- | | |
| | | | | CoR | | |
| 153 | 1692 | gi1546084 | Homo sapiens | farnesol | 165 | 100 |
| | | | | receptor HRR-1 | | |
| 154 | 1698 | gi520469 | Oryctolagus | 597 aa | 177 | 94 |
| | | | cuniculus | protein | | |
| | | | | related to | | |
| | | | | Na/glucose | | |
| | | | | cotransporters | | |
| 155 | 1702 | gi10432382 | Homo sapiens | | 519 | 95 |
| 156 | 1704 | Y91668 | Homo sapiens | Human | 214 | 75 |
| | | | | secreted | | |
| | | | | protein | | |
| | | | | sequence | | |
| | | | | encoded by | | |
| | | | | gene 73 | | |
| 157 | 1708 | gi3080757 | Mus Musculus | growth factor | 457 | 78 |
| | | | | independence- | | |
| | | | | IB | | |
| 158 | 1716 | gi29653 | Homo sapiens | putative | 220 | 92 |
| | | | | oncogene | | |
| 159 | 173 | gi3452473 | Rattus | serine/threonine | 699 | 100 |
| | | | norvegicus | protein | | |
| | | | | kinase TAO1 | | |
| 160 | 1731 | Y27581 | Homo sapiens | Human | 774 | 100 |
| | | | | secreted | | |
| | | | | protein | | |
| | | | | encoded by | | |
| | | | | gene No. 15. | | |
| 161 | 1732 | gi9652087 | Homo sapiens | scavenger | 1025 | 98 |
| | | | | receptor | | |
| | | | | cysteine-rich | | |
| | | | | type 1 protein | | |
| | | | | M160 | | |
| | | | | precursor | | |
| 162 | 174 | Y35923 | Homo sapiens | Extended | 1691 | 100 |
| | | | | human secreted | | |
| | | | | protein | | |
| | | | | sequence, | | |
| 163 | 1740 | Y53014 | Homo sapiens | Human | 337 | 60 |
| | | | | secreted | | |
| | | | | protein clone | | |
| | | | | fn189_13 | | |
| | | | | protein | | |
| | | | | sequence | | |
| 164 | 1748 | gi7770237 | Homo sapiens | PRO2822 | 218 | 93 |
| 165 | 1751 | gi8979825 | Homo sapiens | | 306 | 50 |
| 166 | 1755 | R95332 | Homo sapiens | Tumor | 1184 | 62 |
| | | | | necrosis | | |
| | | | | factor | | |
| | | | | receptor 1 | | |
| | | | | death domain | | |
| | | | | ligand (clone | | |
| | | | | 3TW). | | |
| 167 | 1762 | gi7380947 | Homo sapiens | Gem- | 1545 | 99 |
| | | | | interacting | | |
| | | | | protein | | |
| 168 | 1776 | gi5912265 | Homo sapiens | hypothetical | 224 | 100 |
| | | | | protein | | |
| 169 | 1777 | Y70461 | Homo sapiens | Human | 413 | 95 |
| | | | | membrane | | |
| | | | | channel | | |
| | | | | protein-11 | | |
| | | | | (MECHP-11). | | |
| 170 | 1781 | R26060 | Homo sapiens | Growth Factor | 398 | 98 |
| | | | | Receptor Bound | | |
| | | | | protein GRB-1. | | |
| 171 | 1796 | gi10312169 | Homo sapiens | serine | 1381 | 99 |
| | | | | carboxypeptidase 1 | | |
| | | | | precursor | | |
| | | | | protein | | |
| 172 | 180 | gi3002527 | Homo sapiens | neuronal | 477 | 61 |
| | | | | thread protein | | |
| | | | | AD7c-NTP | | |
| 173 | 182 | gi7385131 | Homo sapiens | HBV pX | 2066 | 82 |
| | | | | associated | | |
| | | | | protein-8; | | |
| | | | | XAP-8 | | |
| 174 | 1820 | G03249 | Homo sapiens | Human | 370 | 97 |
| | | | | secreted | | |
| | | | | protein, | | |
| 175 | 1822 | gi473969 | Oryctolagus | one of the | 1048 | 90 |
| | | | cuniculus | members of | | |
| | | | | sodium-glucose | | |
| | | | | cotransporter | | |
| | | | | family | | |
| 176 | 1829 | gi10440355 | Homo sapiens | FLJ00012 | 310 | 96 |
| | | | | protein | | |
| 177 | 1832 | gi165650 | Oryctolagus | phosphorylase | 146 | 96 |
| | | | cuniculus | kinase beta- | | |
| | | | | subunit | | |
| 178 | 1834 | W75132 | Homo sapiens | Human | 423 | 47 |
| | | | | secreted | | |
| | | | | protein | | |
| | | | | encoded by | | |
| | | | | gene 11 clone | | |
| | | | | HCENJ40. | | |
| 179 | 1837 | gi60369 | Saimiriine | ORF | 615 | 71 |
| | | | herpesvirus 2 | 48˜EDLF5˜sim. | | |
| | | | | to EBV BRRF2 | | |
| 180 | 1859 | gi9989696 | Homo sapiens | ROR2 protein | 645 | 87 |
| 181 | 1880 | gi7340847 | Mus Musculus | chondroItin | 275 | 40 |
| | | | | 4- | | |
| | | | | sulfotransferase | | |
| 182 | 1881 | gi7573291 | Homo sapiens | | 298 | 100 |
| 183 | 1890 | gi3149950 | Homo sapiens | ST1C2 | 183 | 94 |
| 184 | 1899 | gi2143260 | Homo sapiens | Phosphoinositide | 346 | 98 |
| | | | | 3- | | |
| | | | | kinase | | |
| 185 | 19 | gi1808582 | Homo sapiens | U2AF1-RS2 | 224 | 46 |
| 186 | 192 | G03192 | Homo sapiens | Human | 267 | 86 |
| | | | | secreted | | |
| | | | | protein, | | |
| 187 | 1922 | gi485858 | Mus Musculus | IB3/5- | 1206 | 78 |
| | | | | polypeptide | | |
| 188 | 1945 | gi37261 | Homo sapiens | | 1402 | 97 |
| 189 | 195 | W67863 | Homo sapiens | Human | 551 | 98 |
| | | | | secreted | | |
| | | | | protein | | |
| | | | | encoded by | | |
| | | | | gene 57 clone | | |
| | | | | HFEBF41. | | |
| 190 | 1957 | gi406738 | Homo sapiens | Shb | 263 | 44 |
| 191 | 1969 | Y41701 | Homo sapiens | Human PRO708 | 975 | 98 |
| | | | | protein | | |
| | | | | sequence. | | |
| 192 | 1970 | gi3979817 | Caenorhabditis | Weak | 254 | 49 |
| | | | elegans | similarity to | | |
| | | | | Human | | |
| | | | | tyrosine- | | |
| | | | | protein kinase | | |
| | | | | CSK | | |
| 193 | 1973 | G00796 | Homo sapiens | Human | 365 | 98 |
| | | | | secreted | | |
| | | | | protein, | | |
| 194 | 1985 | gi4558637 | Homo sapiens | Putative | 1420 | 99 |
| | | | | Homolog of | | |
| | | | | hypoxia | | |
| | | | | inducible | | |
| | | | | factor three | | |
| | | | | alpha | | |
| 195 | 1986 | gi4455015 | Homo sapiens | host cell | 367 | 50 |
| | | | | factor Homolog | | |
| | | | | LCP | | |
| 196 | 2 | G02532 | Homo sapiens | Human | 106 | 85 |
| | | | | secreted | | |
| | | | | protein, | | |
| 197 | 2004 | gi10503935 | Homo sapiens | type A | 961 | 100 |
| | | | | calpain-like | | |
| | | | | protease | | |
| 198 | 2023 | gi1651341 | Escherichia | | 1075 | 97 |
| | | | coli | | | |
| 199 | 2025 | Y71069 | Homo sapiens | Human | 540 | 100 |
| | | | | membrane | | |
| | | | | transport | | |
| | | | | protein, | | |
| | | | | MTRP-14. | | |
| 200 | 2038 | gi8572543 | Homo sapiens | membrane- | 686 | 98 |
| | | | | associated | | |
| | | | | lectin type-C | | |
| 201 | 2041 | gi37400 | Homo sapiens | trk-2h | 228 | 89 |
| | | | | polypeptide | | |
| 202 | 2043 | W75096 | Homo sapiens | Human | 290 | 38 |
| | | | | secreted | | |
| | | | | protein | | |
| | | | | encoded by | | |
| | | | | gene 40 clone | | |
| | | | | HNEDJ57. | | |
| 203 | 2068 | G03394 | Homo sapiens | Human | 595 | 97 |
| | | | | secreted | | |
| | | | | protein, | | |
| 204 | 2072 | gi2116552 | Rattus | cationic | 1025 | 85 |
| | | | norvegicus | amino acid | | |
| | | | | transporter 3 | | |
| 205 | 2076 | gi157409 | Drosophila | fat protein | 369 | 39 |
| | | | melanogaster | | | |
| 206 | 2078 | gi1054940 | Gallus gallus | cSH-PTP2 | 605 | 94 |
| 207 | 2084 | gi9663128 | Homo sapiens | hypothetical | 874 | 99 |
| | | | | protein | | |
| 208 | 2088 | gi10567590 | Homo sapiens | sodium | 609 | 100 |
| | | | | bicarbonate | | |
| | | | | cotransporter- | | |
| | | | | like protein | | |
| 209 | 2089 | gi1789001 | Escherichia | putative ATP- | 961 | 98 |
| | | | coli | binding | | |
| | | | | component of a | | |
| | | | | transport | | |
| | | | | system | | |
| 210 | 2097 | Y70460 | Homo sapiens | Human | 258 | 96 |
| | | | | membrane | | |
| | | | | channel | | |
| | | | | protein-10 | | |
| | | | | (MECHP-10). | | |
| 211 | 2108 | gi3207508 | Rattus | hexokinase | 767 | 74 |
| | | | norvegicus | | | |
| 212 | 2111 | gi6330233 | Homo sapiens | KIAA1176 | 3710 | 99 |
| | | | | protein | | |
| 213 | 2118 | W74797 | Homo sapiens | Human | 156 | 96 |
| | | | | secreted | | |
| | | | | protein | | |
| | | | | encoded by | | |
| | | | | gene 68 clone | | |
| | | | | HKIXR69. | | |
| 214 | 2134 | gi1780991 | Homo sapiens | branched | 209 | 97 |
| | | | | chain acyl-CoA | | |
| | | | | oxidase | | |
| 215 | 2146 | gi7688148 | Homo sapiens | hypothetical | 1038 | 100 |
| | | | | protein | | |
| 216 | 2149 | gi2280485 | Homo sapiens | KIAA0376 | 917 | 100 |
| 217 | 2153 | gi1842429 | Rattus | ankyrin | 592 | 88 |
| | | | norvegicus | binding cell | | |
| | | | | adhesion | | |
| | | | | molecule | | |
| | | | | neurofascin | | |
| 218 | 2155 | gi6526791 | Homo sapiens | Eps15R | 1126 | 100 |
| 219 | 2161 | gi7300427 | Drosophila | CG7709 gene | 200 | 33 |
| | | | melanogaster | product | | |
| 220 | 2163 | Y52296 | Homo sapiens | Human | 186 | 91 |
| | | | | isomerase | | |
| | | | | Homologue-3 | | |
| | | | | (HIH-3). | | |
| 221 | 2173 | W34526 | Homo sapiens | hTCP protein | 164 | 93 |
| | | | | fragment. | | |
| 222 | 2178 | gi3360512 | Rattus | Citron-K | 299 | 94 |
| | | | norvegicus | kinase | | |
| 223 | 2180 | Y74008 | Homo sapiens | Human | 261 | 41 |
| | | | | prostate tumor | | |
| | | | | EST fragment | | |
| | | | | derived | | |
| | | | | protein #195. | | |
| 224 | 2184 | gi53041 | Mus Musculus | | 130 | 41 |
| 225 | 2186 | gi401774 | Homo sapiens | ribosomal | 142 | 64 |
| | | | | protein S6 | | |
| | | | | kinase 3 | | |
| 226 | 2190 | gi577295 | Homo sapiens | The ha1225 | 176 | 100 |
| | | | | gene product | | |
| | | | | is related to | | |
| | | | | human alpha- | | |
| | | | | glucosidase. | | |
| 227 | 2210 | gi2055392 | Rattus | transmembrane | 620 | 90 |
| | | | norvegicus | receptor | | |
| | | | | UNC5H1 | | |
| 228 | 2214 | gi7861733 | Homo sapiens | low density | 1360 | 98 |
| | | | | lipoprotein | | |
| | | | | receptor | | |
| | | | | related | | |
| | | | | protein- | | |
| | | | | deleted in | | |
| | | | | tumor | | |
| 229 | 2223 | gi7959189 | Homo sapiens | KIAA1464 | 884 | 99 |
| | | | | protein | | |
| 230 | 223 | W88627 | Homo sapiens | Secreted | 300 | 77 |
| | | | | protein | | |
| | | | | encoded by | | |
| | | | | gene 94 clone | | |
| | | | | HPMBQ32. | | |
| 231 | 2233 | gi7839587 | Homo sapiens | organic anion | 1092 | 99 |
| | | | | transporting | | |
| | | | | polypeptide 14 | | |
| 232 | 2237 | gi10440400 | Homo sapiens | FLJ00033 | 1212 | 99 |
| | | | | protein | | |
| 233 | 2251 | gi5923786 | Homo sapiens | zinc metallo- | 277 | 44 |
| | | | | protease | | |
| | | | | ADAMTS6 | | |
| 234 | 2256 | W63698 | Homo sapiens | Human secreted | 516 | 100 |
| | | | | protein 18. | | |
| 235 | 2259 | gi4678722 | Homo sapiens | hypothetical | 387 | 36 |
| | | | | protein | | |
| 236 | 2262 | Y33741 | Homo sapiens | Beta- | 793 | 99 |
| | | | | secretase. | | |
| 237 | 2265 | gi7018545 | Homo sapiens | hypothetical | 608 | 94 |
| | | | | protein | | |
| 238 | 2271 | gi4186183 | Homo sapiens | unknown | 684 | 53 |
| 239 | 2273 | gi7243035 | Homo sapiens | KIAA1327 | 1031 | 100 |
| | | | | protein | | |
| 240 | 2280 | gi5809678 | Homo sapiens | sperm membrane | 342 | 95 |
| | | | | protein BS-63 | | |
| 241 | 2286 | gi6224691 | Homo sapiens | Na+/sulfate | 1221 | 99 |
| | | | | cotransporter | | |
| | | | | SUT-1 | | |
| 242 | 2291 | gi207621 | Rattus | uromodulin | 345 | 50 |
| | | | norvegicus | | | |
| 243 | 2292 | gi7296304 | Drosophila | CG5274 gene | 272 | 35 |
| | | | melanogaster | product | | |
| 244 | 2294 | Y28503 | Homo sapiens | HGFH3 Human | 320 | 98 |
| | | | | Growth Factor | | |
| | | | | Homologue 3. | | |
| 245 | 2296 | W88799 | Homo sapiens | Polypeptide | 223 | 86 |
| | | | | fragment | | |
| | | | | encoded by | | |
| | | | | gene 45. | | |
| 246 | 2303 | gi7110160 | Homo sapiens | guanine | 1212 | 99 |
| | | | | nucleotide | | |
| | | | | exchange | | |
| | | | | factor | | |
| 247 | 2306 | gi6434874 | Mus Musculus | calcium/calmodulin | 576 | 84 |
| | | | | dependent | | |
| | | | | protein kinase | | |
| | | | | kinase alpha | | |
| 248 | 2309 | Y95433 | Homo sapiens | Human calcium | 1203 | 99 |
| | | | | channel SOC- | | |
| | | | | 2/CRAC-1 C- | | |
| | | | | terminal | | |
| | | | | polypeptide. | | |
| 249 | 2313 | gi7300943 | Drosophila | CG4677 gene | 689 | 79 |
| | | | melanogaster | product | | |
| 250 | 2318 | W48351 | Homo sapiens | Human breast | 202 | 59 |
| | | | | cancer related | | |
| | | | | protein | | |
| | | | | BCRB2. | | |
| 251 | 2329 | G01772 | Homo sapiens | Human | 311 | 84 |
| | | | | secreted | | |
| | | | | protein, | | |
| 252 | 2330 | Y41729 | Homo sapiens | Human PRO1071 | 886 | 99 |
| | | | | protein | | |
| | | | | sequence. | | |
| 253 | 2342 | gi3786430 | Caenorhabditis | | 268 | 42 |
| | | | elegans | | | |
| 254 | 2350 | gi930104 | Homo sapiens | protein- | 571 | 79 |
| | | | | tyrosine | | |
| | | | | phosphatase | | |
| 255 | 2359 | gi9392591 | Homo sapiens | CC chemokine | 679 | 99 |
| | | | | CCL28 | | |
| 256 | 2361 | gi1666689 | Mus Musculus | alpha-NAC, | 357 | 41 |
| | | | | Muscle- | | |
| | | | | specific form | | |
| | | | | gp220 | | |
| 257 | 2374 | G03172 | Homo sapiens | Human | 112 | 78 |
| | | | | secreted | | |
| | | | | protein, | | |
| 258 | 2387 | gi1399197 | Homo sapiens | pyruvate | 201 | 85 |
| | | | | dehydrogenase | | |
| | | | | kinase isoform 4 | | |
| 259 | 2401 | G01757 | Homo sapiens | Human | 612 | 99 |
| | | | | secreted | | |
| | | | | protein, | | |
| 260 | 2409 | gi181123 | Homo sapiens | cleavage | 194 | 86 |
| | | | | signal 1 | | |
| | | | | protein | | |
| 261 | 2431 | gi7018547 | Homo sapiens | hypothetical | 473 | 50 |
| | | | | protein | | |
| 262 | 2432 | gi4826496 | Homo sapiens | | 327 | 39 |
| 263 | 2467 | G03667 | Homo sapiens | Human | 640 | 97 |
| | | | | secreted | | |
| | | | | protein, | | |
| 264 | 2471 | gi7688148 | Homo sapiens | hypothetical | 1284 | 91 |
| | | | | protein | | |
| 265 | 2478 | gi790819 | Homo sapiens | polycystic | 615 | 90 |
| | | | | kidney | | |
| | | | | disease- | | |
| | | | | associated | | |
| | | | | protein | | |
| 266 | 2484 | gi3327080 | Homo sapiens | KIAA0633 | 1747 | 99 |
| | | | | protein | | |
| 267 | 249 | G03793 | Homo sapiens | Human | 139 | 65 |
| | | | | secreted | | |
| | | | | protein, | | |
| 268 | 2490 | gi6467371 | Homo sapiens | thyrotropin- | 757 | 98 |
| | | | | releasing | | |
| | | | | hormone | | |
| | | | | degrading | | |
| | | | | ectoenzyme | | |
| 269 | 25 | G03203 | Homo sapiens | Human | 137 | 65 |
| | | | | secreted | | |
| | | | | protein, | | |
| 270 | 2504 | gi4097712 | Homo sapiens | HBV | 166 | 74 |
| | | | | associated | | |
| | | | | factor | | |
| 271 | 2506 | gi2072784 | Homo sapiens | Na+/nucleoside | 201 | 95 |
| | | | | cotransporter | | |
| 272 | 2507 | gi5924007 | Homo sapiens | | 335 | 38 |
| 273 | 2510 | gi7717385 | Homo sapiens | beta-site | 383 | 89 |
| | | | | APP-cleaving | | |
| | | | | enzyme 2, EC | | |
| | | | | 3.4.23. | | |
| 274 | 2523 | gi339709 | Homo sapiens | | 150 | 96 |
| 275 | 253 | gi36615 | Homo sapiens | serine/threonine | 391 | 77 |
| | | | | protein | | |
| | | | | kinase | | |
| 276 | 2533 | gi4589614 | Homo sapiens | KIAA0985 | 191 | 61 |
| | | | | protein | | |
| 277 | 2536 | gi2088685 | Caenorhabditis | strong | 419 | 55 |
| | | | elegans | similarity to | | |
| | | | | the CDC2/CDX | | |
| | | | | subfamily of | | |
| | | | | ser/thr | | |
| | | | | protein | | |
| | | | | kinases | | |
| 278 | 2544 | gi1002425 | Mus Musculus | YSPL-1 form 2 | 280 | 80 |
| 279 | 2568 | Y41738 | Homo sapiens | Human PRO541 | 379 | 49 |
| | | | | protein | | |
| | | | | sequence. | | |
| 280 | 2580 | gi3004482 | Rattus | putative | 382 | 49 |
| | | | norvegicus | integral | | |
| | | | | membrane | | |
| | | | | transport | | |
| | | | | protein | | |
| 281 | 2593 | gi7300049 | Drosophila | CG4525 gene | 582 | 50 |
| | | | melanogaster | product | | |
| 282 | 2600 | gi4530437 | Homo sapiens | thyroid | 334 | 90 |
| | | | | hormone | | |
| | | | | receptor- | | |
| | | | | associated | | |
| | | | | protein | | |
| | | | | complex | | |
| | | | | component | | |
| | | | | TRAP240 | | |
| 283 | 2625 | gi8099652 | Homo sapiens | toll-like | 761 | 96 |
| | | | | receptor 9 | | |
| | | | | form A | | |
| 284 | 2641 | gi148019 | Escherichia | tolA | 692 | 100 |
| | | | coli | | | |
| 285 | 2667 | gi1750387 | Pseudomonas | Carbamoyl- | 143 | 76 |
| | | | aeruginosa | phosphate | | |
| | | | | synthetase | | |
| | | | | large subunit | | |
| 286 | 2670 | gi4883437 | Mus Musculus | RNA binding | 139 | 92 |
| | | | | protein | | |
| 287 | 2673 | Y66656 | Homo sapiens | Membrane- | 1869 | 98 |
| | | | | bound protein | | |
| | | | | PRO943. | | |
| 288 | 2676 | gi3885978 | Mus Musculus | mismatch- | 123 | 88 |
| | | | | specific | | |
| | | | | thymine-DNA | | |
| | | | | glycosylate | | |
| 289 | 2680 | gi6453438 | Homo sapiens | hypothetical | 465 | 82 |
| | | | | protein | | |
| 290 | 2682 | gi1841756 | Mus Musculus | GATA-5 | 527 | 77 |
| | | | | cardiac | | |
| | | | | transcription | | |
| | | | | factor | | |
| 291 | 2684 | gi9844920 | Homo sapiens | nicotinic | 294 | 88 |
| | | | | acetylcholine | | |
| | | | | receptor | | |
| | | | | subunit alpha | | |
| | | | | 10 | | |
| 292 | 2695 | gi1789764 | Escherichia | putative | 879 | 98 |
| | | | coli | transport | | |
| 293 | 2697 | gi349229 | Escherichia | peripheral | 936 | 99 |
| | | | coli | membrane | | |
| | | | | protein | | |
| 294 | 2698 | gi4062194 | Escherichia | | 737 | 100 |
| | | | coli | | | |
| 295 | 2700 | gi529240 | Escherichia | Homoserine | 578 | 100 |
| | | | coli | kinase | | |
| 296 | 2704 | gi1552831 | Escherichia | hypothetical | 420 | 100 |
| | | | coli | | | |
| 297 | 2712 | gi1789672 | Escherichia | putative ATP- | 262 | 100 |
| | | | coli | binding | | |
| | | | | component of a | | |
| | | | | transport | | |
| | | | | system | | |
| 298 | 2716 | gi4062409 | Escherichia | Transmembrane | 382 | 100 |
| | | | coli | protein dppC | | |
| 299 | 2719 | gi304976 | Escherichia | matches | 921 | 95 |
| | | | coli | PS00017: | | |
| | | | | ATP_GTP_A and | | |
| | | | | PS00301: | | |
| | | | | EFACTOR_GTP; | | |
| | | | | similar | | |
| 300 | 2724 | gi145856 | Escherichia | nmpC | 647 | 97 |
| | | | coli | | | |
| 301 | 2725 | gi1789473 | Escherichia | putative | 312 | 100 |
| | | | coli | transport | | |
| | | | | protein | | |
| 302 | 2728 | gi1805561 | Escherichia | | 222 | 97 |
| | | | coli | | | |
| 303 | 2729 | gi43248 | Escherichia | | 655 | 91 |
| | | | coli | | | |
| 304 | 2744 | gi396299 | Escherichia | similar to E. | 675 | 100 |
| | | | coli | coli pyruvate | | |
| | | | | formate-lyase | | |
| | | | | activating | | |
| | | | | enzyme | | |
| 305 | 2749 | gi1742648 | Escherichia | | 592 | 100 |
| | | | coli | | | |
| 306 | 2752 | gi40622 | Escherichia | Sensor kinase | 357 | 100 |
| | | 36 | coli | CitA | | |
| 307 | 2762 | gi1787795 | Escherichia | putative | 342 | 100 |
| | | | coli | LACI-type | | |
| | | | | transcriptional | | |
| | | | | regulator | | |
| 308 | 2764 | gi1799743 | Escherichia | putative | 151 | 84 |
| | | | coli | LACI-type | | |
| | | | | transcriptional | | |
| | | | | regulator | | |
| 309 | 27684 | gi405964 | Escherichia | yohG | 534 | 94 |
| | | | coli | | | |
| 310 | 2774 | gi4062338 | Escherichia | . | 387 | 97 |
| | | | coli | | | |
| 311 | 2790 | gi4062338 | Escherichia | . | 420 | 86 |
| | | | coli | | | |
| 312 | 2800 | gi1789805 | Escherichia | putative | 572 | 100 |
| | | | coli | transport | | |
| 313 | 2811 | gi5305333 | Mus Musculus | protein | 421 | 49 |
| | | | | kinase Myak-S | | |
| 314 | 2827 | gi10047251 | Homo sapiens | KIAA1588 | 531 | 97 |
| | | | | protein | | |
| 315 | 2830 | G02872 | Homo sapiens | Human | 185 | 62 |
| | | | | secreted | | |
| | | | | protein, | | |
| 316 | 2836 | gi191175 | Cricetulus | cAMP- | 1677 | 97 |
| | | | sp. | dependent | | |
| | | | | protein kinase | | |
| | | | | alpha- | | |
| | | | | catalytic | | |
| | | | | subunit | | |
| 317 | 2851 | gi558846 | Homo sapiens | BCL2/adeno- | 220 | 61 |
| | | | | virus E1B | | |
| | | | | 19 kD- | | |
| | | | | interacting | | |
| | | | | protein 3 | | |
| 318 | 2856 | gi3882211 | Homo sapiens | KIAA0745 | 232 | 93 |
| | | | | protein | | |
| 319 | 2866 | gi6329708 | Homo sapiens | KIAA1119 | 1331 | 91 |
| | | | | protein | | |
| 320 | 2874 | gi2853033 | Mus Musculus | tousled-like | 203 | 82 |
| | | | | kinase | | |
| 321 | 2882 | gi10185134 | Schizosaccharomyces | hypothetical | 318 | 42 |
| | | | pombe | zinc-finger | | |
| | | | | protein | | |
| 322 | 2886 | G03797 | Homo sapiens | Human | 140 | 69 |
| | | | | secreted | | |
| | | | | protein, | | |
| 323 | 2899 | gi4240325 | Homo sapiens | KIAA0918 | 170 | 53 |
| | | | | protein | | |
| 324 | 2906 | Y94988 | Homo sapiens | Human | 1738 | 100 |
| | | | | secreted | | |
| | | | | protein v11_1, | | |
| 325 | 2920 | gi9453735 | Homo sapiens | | 1926 | 100 |
| 326 | 2925 | gi6434876 | Homo sapiens | CDK4-binding | 1210 | 100 |
| | | | | protein | | |
| | | | | p34SEI1 | | |
| 327 | 2930 | gi3941320 | Schistosoma | myosin | 208 | 28 |
| | | | japonicum | | | |
| 328 | 2934 | Y31645 | Homo sapiens | Human | 642 | 63 |
| | | | | transport- | | |
| | | | | associated | | |
| | | | | protein-7 | | |
| | | | | (TRANP-7). | | |
| 329 | 2955 | G01165 | Homo sapiens | Human | 528 | 99 |
| | | | | secreted | | |
| | | | | protein, | | |
| 330 | 2967 | gi7263960 | Homo sapiens | | 466 | 100 |
| 331 | 2980 | gi4589530 | Homo sapiens | KIAA0943 | 1849 | 94 |
| | | | | protein | | |
| 332 | 2994 | G03812 | Homo sapiens | Human | 124 | 61 |
| | | | | secreted | | |
| | | | | protein, | | |
| 333 | 2996 | gi9857400 | Homo sapiens | tumor | 2666 | 98 |
| | | | | endothelial | | |
| | | | | marker 1 | | |
| | | | | precursor | | |
| 334 | 2999 | Y66697 | Homo sapiens | Membrane- | 2254 | 100 |
| | | | | bound protein | | |
| | | | | PRO1383. | | |
| 335 | 3 | gi6289072 | Homo sapiens | JM24 protein | 930 | 100 |
| 336 | 3008 | Y45219 | Homo sapiens | Human CASB47 | 557 | 92 |
| | | | | protein. | | |
| 337 | 3013 | gi5262678 | Homo sapiens | hypothetical | 1747 | 100 |
| | | | | protein | | |
| 338 | 3041 | Y73335 | Homo sapiens | HTRM clone | 1315 | 99 |
| | | | | 1850120 | | |
| | | | | protein | | |
| | | | | sequence. | | |
| 339 | 306 | gi4868443 | Mesocricetus | Mx- | 1867 | 95 |
| | | | auratus | interacting | | |
| | | | | protein kinase | | |
| | | | | PKM | | |
| 340 | 3061 | gi433338 | Homo sapiens | protein- | 3934 | 94 |
| | | | | tyrosine | | |
| | | | | kinase | | |
| 341 | 309 | Y76145 | Homo sapiens | Human | 1313 | 99 |
| | | | | secreted | | |
| | | | | protein | | |
| | | | | encoded by | | |
| | | | | gene 22. | | |
| 342 | 3095 | gi7300159 | Drosophila | CG14899 gene | 190 | 57 |
| | | | melanogaster | product | | |
| 343 | 3098 | gi532056 | Homo sapiens | protein- | 2641 | 86 |
| | | | | tyrosine- | | |
| | | | | phosphatase | | |
| 344 | 3105 | gi285987 | Homo sapiens | mitochondrial | 192 | 71 |
| | | | | outer membrane | | |
| | | | | protein 19 | | |
| 345 | 3118 | gi9929935 | Macaca | hypothetical | 180 | 61 |
| | | | fascicularis | protein | | |
| 346 | 3124 | gi8131903 | Mus Musculus | transient | 226 | 100 |
| | | | | receptor | | |
| | | | | potential- | | |
| | | | | related | | |
| | | | | protein | | |
| 347 | 3126 | Y02370 | Homo sapiens | Polypeptide | 261 | 100 |
| | | | | identified by | | |
| | | | | the signal | | |
| | | | | sequence trap | | |
| | | | | method. | | |
| 348 | 3166 | gi7290860 | Drosophila | CG1531 gene | 534 | 42 |
| | | | melanogaster | product | | |
| 349 | 3175 | gi6649583 | Homo sapiens | kidney and | 1752 | 95 |
| | | | | liver proline | | |
| | | | | oxidase 1 | | |
| 350 | 3176 | gi7208438 | Homo sapiens | long-chain 2- | 1048 | 95 |
| | | | | hydroxy acid | | |
| | | | | oxidase HAOX2 | | |
| 351 | 3188 | Y02693 | Homo sapiens | Human | 243 | 57 |
| | | | | secreted | | |
| | | | | protein | | |
| | | | | encoded by | | |
| | | | | gene 44 clone | | |
| | | | | HTDAD22. | | |
| 352 | 3191 | gi7105926 | Homo sapiens | calcium | 300 | 96 |
| | | | | channel | | |
| | | | | alpha2-delta3 | | |
| | | | | subunit | | |
| 353 | 3208 | gi10334774 | Homo sapiens | MUCDHL-FL | 613 | 98 |
| 354 | 3226 | Y87209 | Homo sapiens | Human | 3147 | 99 |
| | | | | secreted | | |
| | | | | protein | | |
| | | | | sequence | | |
| 355 | 3235 | gi6715135 | Homo sapiens | Fanconi | 1947 | 99 |
| | | | | anemia, | | |
| | | | | complementation | | |
| | | | | group F | | |
| 356 | 3257 | gi5441615 | Canis | zinc finger | 326 | 42 |
| | | | familiaris | protein | | |
| 357 | 3282 | G03002 | Homo sapiens | Human | 211 | 61 |
| | | | | secreted | | |
| | | | | protein, | | |
| 358 | 3289 | gi3288457 | Homo sapiens | PI3-kinase | 5832 | 97 |
| 359 | 3296 | gi7770139 | Homo sapiens | PRO1722 | 293 | 64 |
| 360 | 3298 | gi2198815 | Ambystoma | electrogenic | 1278 | 52 |
| | | | tigrinum | Na+ bicarbonate | | |
| | | | | cotransporter; | | |
| | | | | NBC | | |
| 361 | 3303 | gi4028015 | Homo sapiens | potassium | 1881 | 92 |
| | | | | channel | | |
| 362 | 3305 | gi5902966 | Homo sapiens | very large G- | 1770 | 100 |
| | | | | protein | | |
| | | | | coupled | | |
| | | | | receptor-1 | | |
| 363 | 3308 | gi219944 | Homo sapiens | The first in- | 3967 | 86 |
| | | | | frame ATG | | |
| | | | | codon is | | |
| | | | | located at | | |
| | | | | nucleotides | | |
| | | | | NPPase. | | |
| 364 | 3325 | gi3510234 | Homo sapiens | R31237_1, | 192 | 94 |
| | | | | partial CDS | | |
| 365 | 3341 | W78899 | Homo sapiens | Human UNC-5 | 1614 | 90 |
| | | | | Homologue | | |
| | | | | UNC5H-1. | | |
| 366 | 3342 | gi1478205 | Mus Musculus | PNG protein | 341 | 70 |
| 367 | 3350 | gi2739460 | Bos taurus | regulator of | 2263 | 98 |
| | | | | G-protein | | |
| | | | | signaling 7 | | |
| 368 | 3372 | gi7671663 | Homo sapiens | | 375 | 79 |
| 369 | 338 | Y84322 | Homo sapiens | A human | 2606 | 100 |
| | | | | cardiovascular | | |
| | | | | system | | |
| | | | | associated | | |
| | | | | protein | | |
| | | | | kinase-3. | | |
| 370 | 3383 | gi10441382 | Homo sapiens | protein | 1127 | 100 |
| | | | | kinase | | |
| 371 | 3395 | gi530823 | Homo sapiens | epidermal | 402 | 47 |
| | | | | growth factor | | |
| | | | | receptor | | |
| | | | | kinase | | |
| | | | | substrate | | |
| 372 | 3405 | Y29332 | Homo sapiens | Human | 1220 | 94 |
| | | | | secreted | | |
| | | | | protein clone | | |
| | | | | pe584_2 | | |
| | | | | protein | | |
| | | | | sequence. | | |
| 373 | 3408 | gi3334741 | Homo sapiens | shal-type | 2888 | 90 |
| | | | | potassium | | |
| | | | | channel | | |
| 374 | 345 | gi4539527 | Homo sapiens | NAALADase L | 600 | 72 |
| | | | | protein | | |
| 375 | 346 | Y95434 | Homo sapiens | Human calcium | 1802 | 99 |
| | | | | channel SOC- | | |
| | | | | 3/CRAC-2 C- | | |
| | | | | terminal | | |
| | | | | polypeptide. | | |
| 376 | 3470 | gi9798452 | Homo sapiens | putative | 277 | 100 |
| | | | | capacitative | | |
| | | | | calcium | | |
| | | | | channel | | |
| 377 | 3482 | gi3818572 | Homo sapiens | cAMP-specific | 2353 | 96 |
| | | | | phosphodiester | | |
| | | | | ase 8B; | | |
| | | | | PDE8B1; 3′,5′- | | |
| | | | | cyclic | | |
| | | | | nucleotide | | |
| | | | | phosphodiesterase | | |
| 378 | 3492 | gi1665825 | Homo sapiens | | 3878 | 99 |
| 379 | 3530 | gi505100 | Homo sapiens | KIAA0066 | 3637 | 100 |
| 380 | 3533 | Y32169 | Homo sapiens | Human growth- | 2860 | 99 |
| | | | | associated | | |
| | | | | protease | | |
| | | | | inhibitor | | |
| | | | | heavy chain | | |
| | | | | precursor. | | |
| 381 | 3545 | gi6624133 | Homo sapiens | | 449 | 98 |
| 382 | 3549 | gi1469193 | Homo sapiens | The KIAA0135 | 5374 | 99 |
| | | | | gene is | | |
| | | | | related to | | |
| | | | | pim-1 | | |
| | | | | oncogene. | | |
| 383 | 3595 | gi6330190 | Homo sapiens | KIAA1169 | 1893 | 100 |
| | | | | protein | | |
| 384 | 3601 | gi808915 | Homo sapiens | tumor | 992 | 99 |
| | | | | necrosis | | |
| | | | | factor | | |
| | | | | receptor type | | |
| | | | | 1 associated | | |
| | | | | protein | | |
| 385 | 3612 | gi5305448 | Mus Musculus | SH2-B PH | 1439 | 92 |
| | | | | domain | | |
| | | | | containing | | |
| | | | | signaling | | |
| | | | | mediator 1 | | |
| | | | | gamma isoform | | |
| 386 | 3613 | Y32194 | Homo sapiens | Human | 1438 | 100 |
| | | | | receptor | | |
| | | | | molecule (REC) | | |
| | | | | encoded by | | |
| | | | | Incyte clone | | |
| | | | | 266775. | | |
| 387 | 3621 | gi897849 | Mus Musculus | ubiquitinating | 393 | 68 |
| | | | | enzyme E2-230 kDa | | |
| 388 | 3624 | R47858 | Homo sapiens | Human LDL | 2895 | 100 |
| | | | | receptor | | |
| | | | | Domains 1 and | | |
| | | | | 2. | | |
| 389 | 3625 | Y57949 | Homo sapiens | Human | 1868 | 100 |
| | | | | transmembrane | | |
| | | | | protein HTMPN- | | |
| | | | | 73. | | |
| 390 | 3626 | W69342 | Homo sapiens | Secreted | 442 | 94 |
| | | | | protein of | | |
| | | | | clone CJ424_9. | | |
| 391 | 3627 | gi6537136 | Homo sapiens | putative | 982 | 92 |
| | | | | organic anion | | |
| | | | | transporter | | |
| 392 | 3630 | Y06886 | Homo sapiens | HWHHJ20 | 1109 | 91 |
| | | | | polypeptide. | | |
| 393 | 3642 | gi4886467 | Homo sapiens | hypothetical | 570 | 52 |
| | | | | protein | | |
| 394 | 3645 | gi9588402 | Homo sapiens | | 598 | 98 |
| 395 | 3647 | Y12050 | Homo sapiens | Human 5′ EST | 517 | 98 |
| | | | | secreted | | |
| | | | | protein | | |
| 396 | 3653 | Y70018 | Homo sapiens | Human | 2232 | 99 |
| | | | | Protease and | | |
| | | | | associated | | |
| | | | | protein-12 | | |
| | | | | (PPRG-12). | | |
| 397 | 3676 | W67818 | Homo sapiens | Human | 338 | 100 |
| | | | | secreted | | |
| | | | | protein | | |
| | | | | encoded by | | |
| | | | | gene 12 clone | | |
| | | | | HMSJJ74. | | |
| 398 | 3677 | gi32093 | Homo sapiens | HGMP07J | 650 | 52 |
| 399 | 3681 | Y48443 | Homo sapiens | Human | 803 | 93 |
| | | | | prostate | | |
| | | | | cancer- | | |
| | | | | associated | | |
| | | | | protein 140. | | |
| 400 | 3682 | gi4691726 | Homo sapiens | ARF GTPase- | 2435 | 91 |
| | | | | activating | | |
| | | | | protein GIT1 | | |
| 401 | 3688 | gi6693824 | Homo sapiens | ubiquitin- | 1995 | 99 |
| | | | | specific | | |
| | | | | protease | | |
| 402 | 3689 | Y94927 | Homo sapiens | Human | 530 | 81 |
| | | | | secreted | | |
| | | | | protein clone | | |
| | | | | ck213_12 | | |
| | | | | protein | | |
| | | | | sequence | | |
| 403 | 3690 | gi1871612 | Oryctolagus | ryanodine | 594 | 95 |
| | | | cuniculus | receptor | | |
| 404 | 3706 | gi6002714 | Homo sapiens | membrane-type | 2630 | 94 |
| | | | | serine | | |
| | | | | protease 1 | | |
| 405 | 3714 | gi2695708 | Homo sapiens | SPOP | 553 | 81 |
| 406 | 3720 | gi9309293 | Homo sapiens | asc-type | 566 | 95 |
| | | | | amino acid | | |
| | | | | transporter 1 | | |
| 407 | 3726 | gi10440381 | Homo sapiens | FLJ00026 | 1023 | 69 |
| | | | | protein | | |
| 408 | 373 | gi5714696 | Mus Musculus | alpha 2 delta | 243 | 95 |
| | | | | calcium | | |
| | | | | channel | | |
| | | | | subunit | | |
| 409 | 3788 | gi6911219 | Homo sapiens | type II | 841 | 100 |
| | | | | membrane | | |
| | | | | serine | | |
| | | | | protease | | |
| 410 | 3789 | Y45023 | Homo sapiens | Human sensory | 1084 | 95 |
| | | | | transduction | | |
| | | | | G-protein | | |
| | | | | coupled | | |
| | | | | receptor-B3. | | |
| 411 | 3790 | gi1524088 | Homo sapiens | Polio virus | 1508 | 99 |
| | | | | receptor | | |
| | | | | protein | | |
| 412 | 3801 | gi6723675 | Homo sapiens | mitotic | 2035 | 99 |
| | | | | kinase-like | | |
| | | | | protein-1 | | |
| 413 | 3803 | gi968973 | Homo sapiens | mitotic | 332 | 86 |
| | | | | kinase-like | | |
| | | | | protein-1 | | |
| 414 | 3820 | gi1770478 | Homo sapiens | NK receptor | 1988 | 99 |
| 415 | 3831 | gi2781386 | Homo sapiens | | 1493 | 99 |
| 416 | 3837 | gi9367840 | Homo sapiens | neuronal | 2243 | 99 |
| | | | | apoptosis | | |
| | | | | inhibitory | | |
| | | | | protein 2 | | |
| 417 | 385 | gi1526978 | Homo sapiens | ryanodine | 149 | 96 |
| | | | | receptor 2 | | |
| 418 | 3856 | gi995654 | Homo sapiens | interleukin- | 147 | 100 |
| | | | | 11 receptor | | |
| 419 | 386 | gi4960038 | Mus Musculus | T2K protein | 669 | 66 |
| | | | | kinase Homolog | | |
| 420 | 3861 | Y74129 | Homo sapiens | Human | 842 | 98 |
| | | | | prostate tumor | | |
| | | | | EST fragment | | |
| | | | | derived | | |
| | | | | protein #316. | | |
| 421 | 3883 | gi6635205 | Homo sapiens | beta- | 1576 | 100 |
| | | | | ureidopropionase | | |
| 422 | 3898 | gi37231 | Homo sapiens | DNA | 8436 | 99 |
| | | | | topoisomerase | | |
| | | | | II | | |
| 423 | 3921 | gi8648881 | Homo sapiens | putative | 131 | 100 |
| | | | | organic anion | | |
| | | | | transporter | | |
| 424 | 3932 | gi8575775 | Homo sapiens | KRAB zinc | 1935 | 99 |
| | | | | finger protein | | |
| 425 | 3934 | gi4689128 | Homo sapiens | SIH003 | 127 | 92 |
| 426 | 3963 | gi3212996 | Homo sapiens | | 339 | 64 |
| 427 | 3974 | G03790 | Homo sapiens | Human | 232 | 63 |
| | | | | secreted | | |
| | | | | protein, | | |
| 428 | 3983 | gi181971 | Homo sapiens | vascular | 433 | 85 |
| | | | | endothelial | | |
| | | | | growth factor | | |
| 429 | 3999 | gi1657464 | Sus scrofa | calcium/calmodulin- | 484 | 75 |
| | | | | dependent | | |
| | | | | protein kinase | | |
| | | | | II isoform | | |
| | | | | gamma-G | | |
| 430 | 4001 | gi6572230 | Homo sapiens | | 329 | 100 |
| 431 | 4009 | gi2143260 | Homo sapiens | phosphoinositide | 521 | 99 |
| | | | | 3-kinase | | |
| 432 | 401 | gi6572379 | Homo sapiens | | 1372 | 56 |
| 433 | 4020 | gi2815624 | Homo sapiens | tumor | 1252 | 100 |
| | | | | necrosis | | |
| | | | | factor | | |
| | | | | superfamily | | |
| | | | | member LIGHT | | |
| 434 | 4024 | Y21166 | Homo sapiens | Human bcl2 | 84 | 40 |
| | | | | proto-oncogene | | |
| | | | | mutant protein | | |
| | | | | fragment 14. | | |
| 435 | 4040 | Y57285 | Homo sapiens | Human GPCR | 1726 | 99 |
| | | | | protein | | |
| | | | | (HGPRP) | | |
| | | | | sequence | | |
| | | | | (clone ID | | |
| | | | | 2214673). | | |
| 436 | 4057 | W74873 | Homo sapiens | Human | 531 | 100 |
| | | | | secreted | | |
| | | | | protein | | |
| | | | | encoded by | | |
| | | | | gene 145 | | |
| | | | | clone HFXHL79. | | |
| 437 | 4066 | G03714 | Homo sapiens | Human | 92 | 70 |
| | | | | secreted | | |
| | | | | protein, | | |
| 438 | 4067 | gi8331760 | Homo sapiens | LU1 protein | 1077 | 92 |
| 439 | 4078 | Y57900 | Homo sapiens | Human | 996 | 100 |
| | | | | transmembrane | | |
| | | | | protein HTMPN- | | |
| | | | | 24. | | |
| 440 | 4120 | gi1871539 | Homo sapiens | mitogen- | 927 | 100 |
| | | | | activated | | |
| | | | | protein kinase | | |
| | | | | phosphatase 4 | | |
| 441 | 4123 | gi5360125 | Homo sapiens | NY-REN-58 | 140 | 100 |
| | | | | antigen | | |
| 442 | 4130 | gi6289072 | Homo sapiens | JM24 protein | 604 | 100 |
| 443 | 4133 | gi8575527 | Homo sapiens | toll-like | 755 | 100 |
| | | | | receptor 8 | | |
| 444 | 4166 | gi6118555 | Homo sapiens | DEAD-box | 2512 | 100 |
| | | | | protein | | |
| | | | | abstrakt | | |
| 445 | 4167 | gi3800830 | Rattus | putative four | 615 | 93 |
| | | | norvegicus | repeat ion | | |
| | | | | channel | | |
| 446 | 4172 | gi7209676 | Homo sapiens | potassium | 369 | 100 |
| | | | | channel Kv8.1 | | |
| 447 | 4185 | gi5305405 | Homo sapiens | Na+/H+ | 1769 | 100 |
| | | | | exchanger | | |
| | | | | isoform 2 | | |
| 448 | 4197 | gi2811122 | Xenopus | NaDC-2 | 524 | 69 |
| | | | laevis | | | |
| 449 | 4203 | Q89840_aa1 | Homo sapiens | Human death | 198 | 97 |
| | | | | associated | | |
| | | | | protein DAP- | | |
| | | | | 3. | | |
| 450 | 4262 | gi5901478 | Marmota | olfactory | 209 | 92 |
| | | | marmota | receptor | | |
| 451 | 4276 | gi32456 | Homo sapiens | protein- | 3270 | 99 |
| | | | | tyrosine | | |
| | | | | phosphatase | | |
| 452 | 4283 | R41231 | Homo sapiens | GAT-2 | 477 | 100 |
| | | | | transporter | | |
| | | | | gene. | | |
| 453 | 4331 | gi3171912 | Homo sapiens | RAMP2 | 443 | 98 |
| 454 | 4340 | gi8118223 | Homo sapiens | unknown | 1330 | 100 |
| 455 | 4351 | gi1754515 | Rattus | aminopeptidase-B | 2050 | 92 |
| | | | norvegicus | | | |
| 456 | 4354 | Y57906 | Homo sapiens | Human | 1402 | 100 |
| | | | | transmembrane | | |
| | | | | protein HTMPN- | | |
| | | | | 30. | | |
| 457 | 4385 | gi5596433 | Homo sapiens | candidate | 509 | 97 |
| | | | | tumor | | |
| | | | | suppressor | | |
| | | | | protein NOC2 | | |
| 458 | 4388 | W78140 | Homo sapiens | Human | 100 | 94 |
| | | | | secreted | | |
| | | | | protein | | |
| | | | | encoded by | | |
| | | | | gene 15 clone | | |
| | | | | HSDES04. | | |
| 459 | 4405 | Y48226 | Homo sapiens | Human | 1246 | 99 |
| | | | | prostate | | |
| | | | | cancer- | | |
| | | | | associated | | |
| | | | | protein 12. | | |
| 460 | 441 | gi291536 | Bovine | BICP4 | 106 | 35 |
| | | | herpesvirus 1 | | | |
| 461 | 4417 | gi6562533 | Homo sapiens | sialin | 939 | 100 |
| 462 | 4419 | gi1841555 | Homo sapiens | NG5 | 146 | 33 |
| 463 | 4443 | gi496139 | Mus Musculus | AMPA | 262 | 94 |
| | | | | selective | | |
| | | | | glutamate | | |
| | | | | receptor | | |
| 464 | 4470 | gi7248381 | Homo sapiens | adaptor | 2592 | 100 |
| | | | | protein | | |
| | | | | p130Cas | | |
| 465 | 4482 | gi7329979 | Homo sapiens | apoptosis | 2071 | 100 |
| | | | | regulator | | |
| 466 | 4487 | gi6706659 | Homo sapiens | | 405 | 100 |
| 467 | 4491 | gi9837341 | Homo sapiens | CamKI-like | 1044 | 100 |
| | | | | protein kinase | | |
| 468 | 4492 | Y42751 | Homo sapiens | Human calcium | 586 | 99 |
| | | | | binding | | |
| | | | | protein 2 | | |
| | | | | (CaBP-2). | | |
| 469 | 4497 | gi6179740 | Homo sapiens | paraneoplastic | 352 | 37 |
| | | | | cancer-testis- | | |
| | | | | brain antigen | | |
| 470 | 4502 | gi6329742 | Homo sapiens | KIAA1124 | 327 | 100 |
| | | | | protein | | |
| 471 | 4519 | Y99426 | Homo sapiens | Human PRO1604 | 1563 | 100 |
| | | | | (UNQ785) amino | | |
| | | | | acid sequence | | |
| 472 | 4526 | Y08008 | Homo sapiens | Human HLIG-1 | 4023 | 99 |
| | | | | protein. | | |
| 473 | 4547 | gi4589562 | Homo sapiens | KIAA0959 | 4165 | 99 |
| | | | | protein | | |
| 474 | 4554 | gi1381029 | Mus Musculus | | 1164 | 77 |
| 475 | 4555 | gi2792366 | Homo sapiens | unknown | 4461 | 99 |
| | | | | protein IT12 | | |
| 476 | 457 | Y70551 | Homo sapiens | Human latent | 1825 | 100 |
| | | | | transforming | | |
| | | | | growth | | |
| | | | | factor-beta | | |
| | | | | binding | | |
| | | | | protein 3 (I). | | |
| 477 | 4571 | gi5360115 | Homo sapiens | NY-REN-45 | 869 | 100 |
| | | | | antigen | | |
| 478 | 4613 | Y05868 | Homo sapiens | Human Toll | 2413 | 100 |
| | | | | protein | | |
| | | | | PRO358. | | |
| 479 | 4614 | Y27129 | Homo sapiens | Human bone | 1815 | 100 |
| | | | | marrow-derived | | |
| | | | | polypeptide | | |
| | | | | (clone OAF038- | | |
| | | | | Leu). | | |
| 480 | 4622 | G03789 | Homo sapiens | Human | 173 | 53 |
| | | | | secreted | | |
| | | | | protein, | | |
| 481 | 4667 | gi7673638 | Danio rerio | Deddl | 446 | 48 |
| 482 | 4670 | gi402649 | Homo sapiens | c-rel | 2309 | 100 |
| 483 | 4683 | Y68773 | Homo sapiens | Amino acid | 2234 | 99 |
| | | | | sequence of a | | |
| | | | | human | | |
| | | | | phosphorylation | | |
| | | | | effector | | |
| | | | | PHSP-5. | | |
| 484 | 4698 | Y73470 | Homo sapiens | Human | 746 | 100 |
| | | | | secreted | | |
| | | | | protein clone | | |
| | | | | yd141_1 | | |
| | | | | protein | | |
| | | | | sequence | | |
| 485 | 4724 | gi6456846 | Homo sapiens | hypothetical | 1101 | 99 |
| | | | | protein | | |
| 486 | 4734 | gi3334982 | Homo sapiens | R27216_1 | 1151 | 80 |
| 487 | 4814 | gi6274473 | Homo sapiens | pregnancy- | 1348 | 100 |
| | | | | induced growth | | |
| | | | | inhibitor | | |
| 488 | 4819 | Y07825 | Homo sapiens | Human | 117 | 67 |
| | | | | secreted | | |
| | | | | protein | | |
| | | | | fragment #4 | | |
| | | | | encoded from | | |
| | | | | gene 28. | | |
| 489 | 4821 | Y81498 | Homo sapiens | Human foetal | 1200 | 100 |
| | | | | bone-derived | | |
| | | | | growth | | |
| | | | | factor-like | | |
| | | | | protein. | | |
| 490 | 4851 | gi5689491 | Homo sapiens | KIAA1077 | 4364 | 99 |
| | | | | protein | | |
| 491 | 4872 | gi5911953 | Homo sapiens | hypothetical | 3723 | 99 |
| | | | | protein | | |
| 492 | 4902 | B08917 | Homo sapiens | Human | 717 | 100 |
| | | | | secreted | | |
| | | | | protein | | |
| | | | | sequence | | |
| | | | | encoded by | | |
| | | | | gene 27 | | |
| 493 | 5006 | gi435774 | Homo sapiens | receptor | 385 | 100 |
| | | | | tyrosine | | |
| | | | | kinase isoform | | |
| | | | | FLT4 long, | | |
| | | | | FLT41 {C- | | |
| | | | | terminal} | | |
| 494 | 5007 | Y93951 | Homo sapiens | Amino acid | 804 | 100 |
| | | | | sequence of a | | |
| | | | | Brainiac-5 | | |
| | | | | polypeptide. | | |
| 495 | 5027 | gi3548791 | Homo sapiens | R33590_1 | 1606 | 100 |
| 496 | 5029 | gi5689527 | Homo sapiens | KIAA1095 | 5722 | 99 |
| | | | | protein | | |
| 497 | 5033 | Y14482 | Homo sapiens | Fragment of | 166 | 66 |
| | | | | human secreted | | |
| | | | | protein | | |
| | | | | encoded by | | |
| | | | | gene 17. | | |
| 498 | 5040 | Y95019 | Homo sapiens | Human | 258 | 92 |
| | | | | secreted | | |
| | | | | protein vq1_1, | | |
| 499 | 5061 | gi1304434 | Pseudorabies | EP0 | 85 | 38 |
| | | | virus | | | |
| 500 | 5081 | gi4038081 | Homo sapiens | vascular | 134 | 100 |
| | | | | endothelial | | |
| | | | | cell growth | | |
| | | | | inhibitor | | |
| 501 | 5129 | gi3169158 | Homo sapiens | BC269730_2 | 2340 | 99 |
| 502 | 5139 | gi4062856 | Homo sapiens | HEXIM1 | 293 | 47 |
| | | | | protein | | |
| 503 | 5174 | gi9368540 | Homo sapiens | 140up gene | 576 | 90 |
| | | | | product | | |
| 504 | 524 | G00329 | Homo sapiens | Human | 565 | 100 |
| | | | | secreted | | |
| | | | | protein, | | |
| 505 | 5291 | Y92515 | Homo sapiens | Human OXRE- | 1271 | 98 |
| | | | | 12. | | |
| 506 | 5335 | gi7296158 | Drosophila | CG3862 gene | 753 | 46 |
| | | | melanogaster | product | | |
| 507 | 5346 | Y94987 | Homo sapiens | Human | 849 | 100 |
| | | | | secreted | | |
| | | | | protein vj1_1, | | |
| 508 | 5379 | gi7144506 | Homo sapiens | cytokine- | 1353 | 99 |
| | | | | inducible SH2- | | |
| | | | | containing | | |
| | | | | protein | | |
| 509 | 5441 | gi8096551 | Homo sapiens | similar to | 1516 | 100 |
| | | | | mouse Ehm2 | | |
| 510 | 549 | Y22113 | Homo sapiens | Human ZSMF-3 | 294 | 62 |
| | | | | protein | | |
| | | | | sequence. | | |
| 511 | 5542 | Y76267 | Homo sapiens | Fragment of | 1066 | 100 |
| | | | | human secreted | | |
| | | | | protein | | |
| | | | | encoded by | | |
| | | | | gene 11. | | |
| 512 | 5560 | G03790 | Homo sapiens | Human | 103 | 36 |
| | | | | secreted | | |
| | | | | protein, | | |
| 513 | 5696 | gi7920398 | Homo sapiens | PTOV1 | 1904 | 91 |
| 514 | 5704 | B08930 | Homo sapiens | Human | 987 | 100 |
| | | | | secreted | | |
| | | | | protein | | |
| | | | | sequence | | |
| | | | | encoded by | | |
| | | | | gene 2 | | |
| 515 | 5758 | W18878 | Homo sapiens | Human protein | 368 | 100 |
| | | | | kinase C | | |
| | | | | inhibitor, | | |
| | | | | IPKC-1. | | |
| 516 | 5760 | gi6562176 | Homo sapiens | hypothetical | 425 | 100 |
| | | | | protein | | |
| 517 | 5763 | Y41706 | Homo sapiens | Human PRO381 | 441 | 100 |
| | | | | protein | | |
| | | | | sequence. | | |
| 518 | 5787 | Y57907 | Homo sapiens | Human | 952 | 100 |
| | | | | transmembrane | | |
| | | | | protein HTMPN- | | |
| | | | | 31. | | |
| 519 | 5823 | gi9800242 | rat | pr5 | 153 | 36 |
| | | | cytomegalovirus | | | |
| | | | Maastricht | | | |
| 520 | 5886 | gi1781037 | Mus Musculus | neuronal | 1135 | 52 |
| | | | | tyrosine | | |
| | | | | threonine | | |
| | | | | phosphatase 1 | | |
| 521 | 5924 | W69221 | Homo sapiens | Human parotid | 710 | 96 |
| | | | | secretory | | |
| | | | | protein. | | |
| 522 | 5960 | Y91529 | Homo sapiens | Human | 1300 | 99 |
| | | | | secreted | | |
| | | | | protein | | |
| | | | | sequence | | |
| | | | | encoded by | | |
| | | | | gene 79 | | |
| 523 | 5962 | W69784 | Homo sapiens | Protein | 395 | 100 |
| | | | | Kinase C | | |
| | | | | Inhibitor-like | | |
| | | | | Protein | | |
| | | | | (IPKC-2). | | |
| 524 | 5969 | Y79141 | Homo sapiens | Human | 1205 | 79 |
| | | | | haemopoietic | | |
| | | | | stem cell | | |
| | | | | regulatory | | |
| | | | | protein | | |
| | | | | SCM113. | | |
| 525 | 5976 | gi780310 | Homo sapiens | natural | 1808 | 91 |
| | | | | killer | | |
| | | | | associated | | |
| | | | | transcript 4 | | |
| 526 | 6002 | gi2104553 | Homo sapiens | | 4367 | 67 |
| 527 | 6008 | Y66765 | Homo sapiens | Membrane- | 822 | 100 |
| | | | | bound protein | | |
| | | | | PRO1384. | | |
| 528 | 6020 | gi1911548 | Homo sapiens | cytochrome c- | 322 | 50 |
| | | | | like | | |
| | | | | polypeptide | | |
| 529 | 6036 | W71362 | Homo sapiens | Human | 353 | 51 |
| | | | | cytokine/steroid | | |
| | | | | receptor | | |
| | | | | protein. | | |
| 530 | 6070 | Y42750 | Homo sapiens | Human calcium | 626 | 100 |
| | | | | binding | | |
| | | | | protein 1 | | |
| | | | | (CaBP-1). | | |
| 531 | 6075 | gi10732648 | Homo sapiens | angiopoietin- | 2164 | 100 |
| | | | | like protein | | |
| | | | | PP1158 | | |
| 532 | 6106 | gi2217970 | Homo sapiens | p40 | 1349 | 96 |
| 533 | 6420 | W82000 | Homo sapiens | Human adult | 929 | 100 |
| | | | | brain secreted | | |
| | | | | protein | | |
| | | | | dm26_2. | | |
| 534 | 6434 | gi10732648 | Homo sapiens | angiopoietin- | 2164 | 100 |
| | | | | like protein | | |
| | | | | PP1158 | | |
| 535 | 6439 | gi189701 | Homo sapiens | endothelial | 376 | 100 |
| | | | | cell growth | | |
| | | | | factor | | |
| 536 | 6463 | Y41720 | Homo sapiens | Human PRO792 | 360 | 82 |
| | | | | protein | | |
| | | | | sequence. | | |
| 537 | 6466 | gi4884084 | Homo sapiens | hypothetical | 538 | 100 |
| | | | | protein | | |
| 538 | 6508 | gi5442030 | Homo sapiens | aminopeptidase | 2317 | 96 |
| 539 | 6570 | gi5921491 | Homo sapiens | | 1591 | 99 |
| 540 | 6719 | gi31847 | Homo sapiens | glypican | 1625 | 87 |
| 541 | 6772 | Y65432 | Homo sapiens | Human 5′ EST | 180 | 53 |
| | | | | related | | |
| | | | | polypeptide | | |
| 542 | 6789 | gi537292 | Homo sapiens | ICH-1L | 1556 | 100 |
| 543 | 6805 | gi4454702 | Homo sapiens | HSPC007 | 634 | 84 |
| 544 | 6833 | gi1890660 | Homo sapiens | protein | 5726 | 87 |
| | | | | tyrosine | | |
| | | | | phosphatase | | |
| | | | | receptor | | |
| | | | | omicron | | |
| 545 | 6834 | gi5921491 | Homo sapiens | | 1746 | 88 |
| 546 | 6851 | gi2407641 | Homo sapiens | neuropilin | 3968 | 98 |
| 547 | 6868 | gi6714641 | Drosophila | MAP kinase | 218 | 49 |
| | | | melanogaster | phosphatase | | |
| 548 | 6876 | Y13138 | Homo sapiens | Human | 414 | 76 |
| | | | | secreted | | |
| | | | | protein | | |
| | | | | encoded by 5′ | | |
| | | | | EST | | |
| 549 | 688 | Y73463 | Homo sapiens | Human | 701 | 98 |
| | | | | secreted | | |
| | | | | protein clone | | |
| | | | | yk199_1 | | |
| | | | | protein | | |
| | | | | sequence | | |
| 550 | 6897 | gi5815180 | Homo sapiens | unknown | 509 | 97 |
| 551 | 690 | gi10645186 | Homo sapiens | meningioma- | 522 | 100 |
| | | | | expressed | | |
| | | | | antigen 5s | | |
| | | | | splice variant | | |
| 552 | 6909 | W78149 | Homo sapiens | Human | 485 | 100 |
| | | | | secreted | | |
| | | | | protein | | |
| | | | | encoded by | | |
| | | | | gene 24 clone | | |
| | | | | HSVBF78. | | |
| 553 | 6924 | Y35923 | Homo sapiens | Extended | 514 | 99 |
| | | | | human secreted | | |
| | | | | protein | | |
| | | | | sequence, | | |
| 554 | 6937 | G03798 | Homo sapiens | Human | 281 | 70 |
| | | | | secreted | | |
| | | | | protein, | | |
| 555 | 6951 | gi511857 | Homo sapiens | prostate- | 364 | 95 |
| | | | | specific | | |
| | | | | antigen | | |
| 556 | 7008 | G03200 | Homo sapiens | Human | 548 | 98 |
| | | | | secreted | | |
| | | | | protein, | | |
| 557 | 7009 | Y22213 | Homo sapiens | Human V201 | 856 | 100 |
| | | | | protein | | |
| | | | | sequence. | | |
| 558 | 7057 | gi6003654 | Homo sapiens | brain | 1814 | 100 |
| | | | | specific | | |
| | | | | membrane- | | |
| | | | | anchored | | |
| | | | | protein BSMAP | | |
| 559 | 7098 | W27291 | Homo sapiens | Human H1075-1 | 712 | 100 |
| | | | | secreted | | |
| | | | | protein 5′ | | |
| | | | | end. | | |
| 560 | 7114 | gi3212110 | Homo sapiens | prefoldin | 534 | 98 |
| | | | | subunit 1 | | |
| 561 | 712 | gi4558641 | Homo sapiens | P85B_HUMAN; | 470 | 74 |
| | | | | PTDINS-3- | | |
| | | | | KINASE P85- | | |
| | | | | BETA | | |
| 562 | 7215 | gi4868366 | Homo sapiens | delta-6 fatty | 2437 | 100 |
| | | | | acid | | |
| | | | | desaturase | | |
| 563 | 7244 | Y12445 | Homo sapiens | Human 5′ EST | 428 | 100 |
| | | | | secreted | | |
| | | | | protein | | |
| 564 | 7248 | gi311376 | Homo sapiens | Humig | 633 | 100 |
| 565 | 7252 | gi5689531 | Homo sapiens | KIAA1097 | 5240 | 100 |
| | | | | protein | | |
| 566 | 7292 | gi5106998 | Homo sapiens | HSPC040 | 580 | 100 |
| | | | | protein | | |
| 567 | 7306 | Y32201 | Homo sapiens | Human | 1974 | 95 |
| | | | | receptor | | |
| | | | | molecule (REC) | | |
| | | | | encoded by | | |
| | | | | Incyte clone | | |
| | | | | 2057886. | | |
| 568 | 7338 | Y73880 | Homo sapiens | Human | 1566 | 100 |
| | | | | prostate tumor | | |
| | | | | EST fragment | | |
| | | | | derived | | |
| | | | | protein #67. | | |
| 569 | 736 | gi10178317 | Homo sapiens | | 1468 | 100 |
| 570 | 737 | G00851 | Homo sapiens | Human | 522 | 98 |
| | | | | secreted | | |
| | | | | protein, | | |
| 571 | 740 | W85610 | Homo sapiens | Secreted | 1115 | 87 |
| | | | | protein clone | | |
| | | | | eh80_1. | | |
| 572 | 7400 | Y93948 | Homo sapiens | Amino acid | 1982 | 98 |
| | | | | sequence of a | | |
| | | | | lectin ss3939 | | |
| | | | | polypeptide. | | |
| 573 | 7415 | gi3043670 | Homo sapiens | KIAA0573 | 2392 | 100 |
| | | | | protein | | |
| 574 | 7429 | Y40864 | Homo sapiens | A human | 1183 | 99 |
| | | | | glutathione-S- | | |
| | | | | transferase | | |
| | | | | (hGST) | | |
| | | | | protein. | | |
| 575 | 7458 | Y53643 | Homo sapiens | A bone marrow | 554 | 99 |
| | | | | secreted | | |
| | | | | protein | | |
| | | | | designated | | |
| | | | | BMS6. | | |
| 576 | 7516 | gi4468311 | Homo sapiens | | 1146 | 99 |
| 577 | 7526 | gi4138922 | Homo sapiens | promyelocytic | 3571 | 99 |
| | | | | leukemia zinc | | |
| | | | | finger | | |
| | | | | protein; | | |
| | | | | kruppel-like | | |
| | | | | zinc finger | | |
| | | | | protein; PLZF | | |
| 578 | 7571 | G02915 | Homo sapiens | Human | 209 | 100 |
| | | | | secreted | | |
| | | | | protein, | | |
| 579 | 7614 | W74726 | Homo sapiens | Human | 1879 | 100 |
| | | | | secreted | | |
| | | | | protein | | |
| | | | | fg949_3. | | |
| 580 | 7663 | gi5912548 | Homo sapiens | | 1634 | 100 |
| 581 | 7686 | gi4929711 | Homo sapiens | CGI-121 | 870 | 100 |
| | | | | protein | | |
| 582 | 7714 | gi388765 | Homo sapiens | phospholipase D | 4428 | 99 |
| 583 | 7724 | G03933 | Homo sapiens | Human | 570 | 100 |
| | | | | secreted | | |
| | | | | protein, | | |
| 584 | 7834 | gi8919166 | Homo sapiens | mesenchymal | 1133 | 100 |
| | | | | stem cell | | |
| | | | | protein DSC92 | | |
| 585 | 7855 | Y48505 | Homo sapiens | Human breast | 684 | 100 |
| | | | | tumour- | | |
| | | | | associated | | |
| | | | | protein 50. | | |
| 586 | 7870 | Y13372 | Homo sapiens | Amino acid | 2559 | 100 |
| | | | | sequence of | | |
| | | | | protein | | |
| | | | | PRO223. | | |
| 587 | 7871 | Y91689 | Homo sapiens | Human | 768 | 100 |
| | | | | secreted | | |
| | | | | protein | | |
| | | | | sequence | | |
| | | | | encoded by | | |
| | | | | gene 93 | | |
| 588 | 7892 | gi34659 | Homo sapiens | macrophage | 532 | 100 |
| | | | | inflammatory | | |
| | | | | protein-2alpha | | |
| | | | | precursor | | |
| 589 | 7927 | gi32575 | Homo sapiens | | 183 | 91 |
| 590 | 7944 | gi1657458 | Sus scrofa | calcium/calmodulin- | 2744 | 100 |
| | | | | dependent | | |
| | | | | protein kinase | | |
| | | | | II isoform | | |
| | | | | gamma-B | | |
| 591 | 7947 | G01131 | Homo sapiens | Human | 574 | 96 |
| | | | | secreted | | |
| | | | | protein, | | |
| 592 | 800 | gi3021428 | Homo sapiens | neutral | 167 | 68 |
| | | | | sphingomyelinase | | |
| 593 | 8055 | gi4929637 | Homo sapiens | CGI-84 | 1038 | 100 |
| | | | | protein | | |
| 594 | 8082 | gi4679014 | Homo sapiens | HSPC014 | 715 | 100 |
| 595 | 8127 | gi9955693 | Homo sapiens | twisted | 905 | 95 |
| | | | | gastrulation | | |
| | | | | protein | | |
| 596 | 8174 | gi5532294 | Homo sapiens | MUM2 | 767 | 100 |
| 597 | 8178 | gi4530587 | Homo sapiens | TADA1 protein | 1132 | 100 |
| 598 | 8215 | R66278 | Homo sapiens | Therapeutic | 830 | 100 |
| | | | | polypeptide | | |
| | | | | from | | |
| | | | | glioblastoma | | |
| | | | | cell line. | | |
| 599 | 8263 | Y48371 | Homo sapiens | Human | 713 | 98 |
| | | | | prostate | | |
| | | | | cancer- | | |
| | | | | associated | | |
| | | | | protein 68. | | |
| 600 | 827 | gi3172337 | Cavia | phospholipase B | 955 | 73 |
| | | | porcellus | | | |
| 601 | 828 | Y29517 | Homo sapiens | Human lung | 833 | 94 |
| | | | | tumour protein | | |
| | | | | SAL-82 | | |
| | | | | predicted | | |
| | | | | amino acid | | |
| | | | | sequence. | | |
| 602 | 8294 | gi4929767 | Homo sapiens | CGI-149 | 1085 | 100 |
| | | | | protein | | |
| 603 | 8313 | gi5771420 | Homo sapiens | group IID | 852 | 100 |
| | | | | secretory | | |
| | | | | phospholipase | | |
| | | | | A2 | | |
| 604 | 832 | Y86260 | Homo sapiens | Human | 319 | 78 |
| | | | | secreted | | |
| | | | | protein | | |
| | | | | HELHN47, | | |
| 605 | 8357 | gi4191358 | Mus Musculus | claudin-7 | 164 | 47 |
| 606 | 8373 | gi1945271 | Homo sapiens | protein | 1666 | 100 |
| | | | | phosphatase 6 | | |
| 607 | 8379 | gi5852981 | Homo sapiens | | 1226 | 100 |
| | | | | cardiotrophin- | | |
| | | | | like cytokine | | |
| | | | | CLC | | |
| 608 | 8380 | gi3402216 | Homo sapiens | protein | 974 | 100 |
| 609 | 8386 | gi386988 | Homo sapiens | oncostatin M | 1297 | 99 |
| 610 | 8418 | Y70210 | Homo sapiens | Human TANGO | 722 | 98 |
| | | | | 130 protein. | | |
| 611 | 8442 | G01895 | Homo sapiens | Human | 490 | 95 |
| | | | | secreted | | |
| | | | | protein, | | |
| 612 | 8457 | G04048 | Homo sapiens | Human | 450 | 98 |
| | | | | secreted | | |
| | | | | protein, | | |
| 613 | 8458 | W97119 | Homo sapiens | S-adenosyl-L- | 1484 | 100 |
| | | | | methyltransfer | | |
| | | | | ase (SAM-MT) | | |
| | | | | protein. | | |
| 614 | 8469 | gi7159799 | Homo sapiens | | 255 | 100 |
| 615 | 8480 | gi4589530 | Homo sapiens | KIAA0943 | 1998 | 100 |
| | | | | protein | | |
| 616 | 8521 | gi5726235 | multiple | unknown | 250 | 82 |
| | | | sclerosis | protein U5/2 | | |
| | | | associated | | | |
| | | | retrovirus | | | |
| | | | element | | | |
| 617 | 857 | gi9663958 | Homo sapiens | cysteinyl | 612 | 99 |
| | | | | leukotriene | | |
| | | | | CysLT2 | | |
| | | | | receptor | | |
| 618 | 8574 | gi6841260 | Homo sapiens | HSPC305 | 1049 | 100 |
| 619 | 8606 | gi3367707 | Homo sapiens | scrapie | 544 | 100 |
| | | | | responsive | | |
| | | | | protein 1 | | |
| 620 | 8632 | G01158 | Homo sapiens | Human | 502 | 100 |
| | | | | secreted | | |
| | | | | protein, | | |
| 621 | 8646 | gi3882249 | Homo sapiens | KIAA0764 | 2175 | 100 |
| | | | | protein | | |
| 622 | 8666 | Y66196 | Homo sapiens | Human bladder | 1080 | 95 |
| | | | | tumour EST | | |
| | | | | encoded | | |
| | | | | protein 54. | | |
| 623 | 8675 | gi9963908 | Homo sapiens | NPD009 | 432 | 96 |
| 624 | 8683 | G04018 | Homo sapiens | Human | 469 | 98 |
| | | | | secreted | | |
| | | | | protein, | | |
| 625 | 8708 | gi1633564 | Homo sapiens | C8 | 364 | 98 |
| 626 | 8720 | gi8248465 | Homo sapiens | hepatocellular | 191 | 69 |
| | | | | carcinoma- | | |
| | | | | associated | | |
| | | | | antigen 56A | | |
| 627 | 8756 | Y94984 | Homo sapiens | Human | 369 | 97 |
| | | | | secreted | | |
| | | | | protein | | |
| | | | | ve11_1, | | |
| 628 | 8765 | Y00346 | Homo sapiens | Fragment of | 1068 | 97 |
| | | | | human secreted | | |
| | | | | protein | | |
| | | | | encoded by | | |
| | | | | gene 2. | | |
| 629 | 8783 | Y27918 | Homo sapiens | Human | 1051 | 95 |
| | | | | secreted | | |
| | | | | protein | | |
| | | | | encoded by | | |
| | | | | gene No. 123. | | |
| 630 | 8804 | Y25426 | Homo sapiens | Human SIGIRR | 887 | 100 |
| | | | | protein. | | |
| 631 | 8838 | Y99409 | Homo sapiens | Human PRO1343 | 1279 | 100 |
| | | | | (UNQ698) amino | | |
| | | | | acid sequence | | |
| 632 | 8851 | W74785 | Homo sapiens | Human | 454 | 100 |
| | | | | secreted | | |
| | | | | protein | | |
| | | | | encoded by | | |
| | | | | gene 56 clone | | |
| | | | | HSAXS65. | | |
| 633 | 8853 | W75116 | Homo sapiens | Human | 245 | 95 |
| | | | | secreted | | |
| | | | | protein | | |
| | | | | encoded by | | |
| | | | | gene 60 clone | | |
| | | | | HILCJ01. | | |
| 634 | 8857 | gi2565196 | Homo sapiens | non- | 479 | 74 |
| | | | | functional | | |
| | | | | folate binding | | |
| | | | | protein | | |
| 635 | 8859 | Y02690 | Homo sapiens | Human | 600 | 100 |
| | | | | secreted | | |
| | | | | protein | | |
| | | | | encoded by | | |
| | | | | gene 41c lone | | |
| | | | | HSZAF47. | | |
| 636 | 8901 | Y86491 | Homo sapiens | Human gene | 548 | 99 |
| | | | | 59-encoded | | |
| | | | | protein | | |
| | | | | fragment, | | |
| 637 | 8907 | W88745 | Homo sapiens | Secreted | 2004 | 99 |
| | | | | protein | | |
| | | | | encoded by | | |
| | | | | gene 30 clone | | |
| | | | | HTSEV09. | | |
| 638 | 8934 | W75088 | Homo sapiens | Human | 421 | 98 |
| | | | | secreted | | |
| | | | | protein | | |
| | | | | encoded by | | |
| | | | | gene 32 clone | | |
| | | | | HAGBB70. | | |
| 639 | 8960 | Y02693 | Homo sapiens | Human | 267 | 72 |
| | | | | secreted | | |
| | | | | protein | | |
| | | | | encoded by | | |
| | | | | gene 44 clone | | |
| | | | | HTDAD22. | | |
| 640 | 8979 | Y76143 | Homo sapiens | Human | 1374 | 98 |
| | | | | secreted | | |
| | | | | protein | | |
| | | | | encoded by | | |
| | | | | gene 20. | | |
| 641 | 8980 | Y11433 | Homo sapiens | Human 5′ EST | 466 | 100 |
| | | | | secreted | | |
| | | | | protein | | |
| 642 | 8986 | G02626 | Homo sapiens | Human | 306 | 100 |
| | | | | secreted | | |
| | | | | protein, | | |
| 643 | 8987 | G02093 | Homo sapiens | Human | 486 | 97 |
| | | | | secreted | | |
| | | | | protein, | | |
| 644 | 8995 | Y12908 | Homo sapiens | Human 5′ EST | 181 | 100 |
| | | | | secreted | | |
| | | | | protein | | |
| 645 | 9035 | Y71108 | Homo sapiens | Human | 800 | 100 |
| | | | | Hydrolase | | |
| | | | | protein-6 | | |
| | | | | (HYDRL-6). | | |
| 646 | 9062 | gi8886005 | Homo sapiens | lysophosphatidic | 523 | 100 |
| | | | | acid | | |
| | | | | acyltransferase- | | |
| | | | | delta | | |
| 647 | 9074 | Y25761 | Homo sapiens | Human | 1366 | 99 |
| | | | | secreted | | |
| | | | | protein | | |
| | | | | encoded from | | |
| | | | | gene 51. | | |
| 648 | 9075 | Y73336 | Homo sapiens | HTRM clone | 1591 | 100 |
| | | | | 1852290 | | |
| | | | | protein | | |
| | | | | sequence. | | |
| 649 | 9098 | Y57878 | Homo sapiens | Human | 516 | 100 |
| | | | | transmembrane | | |
| | | | | protein HTMPN-2. | | |
| 650 | 9109 | gi23903 | Homo sapiens | 63 kDa protein | 1141 | 97 |
| | | | | kinase | | |
| 651 | 911 | gi32456 | Homo sapiens | protein- | 2591 | 100 |
| | | | | tyrosine | | |
| | | | | phosphatase | | |
| 652 | 912 | gi1136743 | Homo sapiens | human P5 | 212 | 46 |
| 653 | 9163 | Y34129 | Homo sapiens | Human | 377 | 71 |
| | | | | potassium | | |
| | | | | channel | | |
| | | | | K + Hnov28. | | |
| 654 | 9164 | Y41324 | Homo sapiens | Human | 1083 | 99 |
| | | | | secreted | | |
| | | | | protein | | |
| | | | | encoded by | | |
| | | | | gene 17 clone | | |
| | | | | HNFIY77. | | |
| 655 | 9173 | gi6851256 | Mus Musculus | protein | 631 | 93 |
| | | | | tyrosine | | |
| | | | | phosphatase- | | |
| | | | | like protein | | |
| | | | | PTPLB | | |
| 656 | 9187 | Y66721 | Homo sapiens | Membrane- | 1173 | 95 |
| | | | | bound protein | | |
| | | | | PRO511. | | |
| 657 | 9190 | W40378 | Homo sapiens | Human breast | 792 | 81 |
| | | | | cancer protein | | |
| | | | | CH14-2a16-1 | | |
| | | | | from 2.0 kB | | |
| | | | | DNA fragment | | |
| | | | | #2. | | |
| 658 | 9194 | Y02781 | Homo sapiens | Human | 462 | 70 |
| | | | | secreted | | |
| | | | | protein. | | |
| 659 | 9210 | G02994 | Homo sapiens | Human | 166 | 80 |
| | | | | secreted | | |
| | | | | protein, | | |
| 660 | 9222 | G02520 | Homo sapiens | Human | 186 | 43 |
| | | | | secreted | | |
| | | | | protein, | | |
| 661 | 9230 | gi6706554 | Homo sapiens | inositol | 1315 | 95 |
| | | | | 1,4,5- | | |
| | | | | trisphosphate | | |
| | | | | 3-kinase B | | |
| 662 | 9258 | gi522145 | Homo sapiens | B-cell growth | 120 | 56 |
| | | | | factor | | |
| 663 | 9260 | G04072 | Homo sapiens | Human | 138 | 51 |
| | | | | secreted | | |
| | | | | protein, | | |
| 664 | 9271 | gi6690095 | Homo sapiens | tetraspanin | 317 | 67 |
| | | | | protein | | |
| 665 | 9272 | gi163042 | Bos taurus | factor | 444 | 72 |
| | | | | activating | | |
| | | | | exoenzyme S | | |
| 666 | 9275 | gi401774 | Homo sapiens | ribosomal | 424 | 81 |
| | | | | protein S6 | | |
| | | | | kinase 3 | | |
| 667 | 930 | G02355 | Homo sapiens | Human | 167 | 41 |
| | | | | secreted | | |
| | | | | protein, | | |
| 668 | 9304 | gi8979743 | Canis | Band4.1-like5 | 1493 | 93 |
| | | | familiaris | protein | | |
| 669 | 9346 | gi2738989 | Mus Musculus | high mobility | 384 | 89 |
| | | | | group protein | | |
| | | | | Homolog HMG4 | | |
| 670 | 9347 | gi36613 | Homo sapiens | serine/threonine | 199 | 91 |
| | | | | protein | | |
| | | | | kinase | | |
| 671 | 935 | gi5541870 | Homo sapiens | QA79 membrane | 334 | 57 |
| | | | | protein, | | |
| | | | | allelic | | |
| | | | | variant airm- | | |
| | | | | 1b | | |
| 672 | 9350 | gi3327124 | Homo sapiens | KIAA0655 | 757 | 87 |
| | | | | protein | | |
| 673 | 9351 | W57260 | Homo sapiens | Human | 573 | 95 |
| | | | | semaphorin Y. | | |
| 674 | 9356 | gi59977 | Human | tripartite | 127 | 59 |
| | | | endogenous | fusion | | |
| | | | retrovirus | transcript | | |
| | | | | PLA2L | | |
| 675 | 9363 | Y17834 | Homo sapiens | Human PRO361 | 968 | 92 |
| | | | | protein | | |
| | | | | sequence. | | |
| 676 | 9366 | gi72431 | Homo sapiens | KIAA1374 | 649 | 96 |
| | | | | protein | | |
| 677 | 9369 | G03793 | Homo sapiens | Human | 222 | 69 |
| | | | | secreted | | |
| | | | | protein, | | |
| 678 | 9378 | gi4468311 | Homo sapiens | | 163 | 39 |
| 679 | 9393 | gi2738989 | Mus Musculus | high mobility | 384 | 89 |
| | | | | group protein | | |
| | | | | Homolog HMG4 | | |
| 680 | 9444 | G01399 | Homo sapiens | Human | 157 | 93 |
| | | | | secreted | | |
| | | | | protein, | | |
| 681 | 9467 | gi4454702 | Homo sapiens | HSPC007 | 230 | 71 |
| 682 | 9486 | gi10047243 | Homo sapiens | KIAA1584 | 605 | 93 |
| | | | | protein | | |
| 683 | 949 | Y30895 | Homo sapiens | Human | 704 | 99 |
| | | | | secreted | | |
| | | | | protein | | |
| | | | | fragment | | |
| | | | | encoded from | | |
| | | | | gene 25. | | |
| 684 | 9499 | W36002 | Homo sapiens | Human Fchd531 | 2173 | 96 |
| | | | | gene product. | | |
| 685 | 9510 | gi1665799 | Homo sapiens | | 867 | 83 |
| 686 | 9523 | Y53022 | Homo sapiens | Human | 1252 | 89 |
| | | | | secreted | | |
| | | | | protein clone | | |
| | | | | qf116_2 | | |
| | | | | protein | | |
| | | | | sequence | | |
| 687 | 9534 | Y66670 | Homo sapiens | Membrane- | 998 | 100 |
| | | | | bound protein | | |
| | | | | PRO1180. | | |
| 688 | 9539 | Y76144 | Homo sapiens | Human | 633 | 100 |
| | | | | secreted | | |
| | | | | protein | | |
| | | | | encoded by | | |
| | | | | gene 21. | | |
| 689 | 954 | G02490 | Homo sapiens | Human | 160 | 78 |
| | | | | secreted | | |
| | | | | protein, | | |
| 690 | 9546 | gi181121 | Homo sapiens | chorionic | 616 | 96 |
| | | | | somatomammotropin | | |
| 691 | 955 | gi7243103 | Homo sapiens | KIAA1361 | 2042 | 100 |
| | | | | protein | | |
| 692 | 9551 | gi1772345 | Homo sapiens | ras-related | 341 | 57 |
| | | | | GTP-binding | | |
| | | | | protein | | |
| 693 | 9558 | W88403 | Homo sapiens | Human adult | 2252 | 100 |
| | | | | testis | | |
| | | | | secreted | | |
| | | | | protein | | |
| | | | | ga63_6. | | |
| 694 | 9561 | gi6690017 | Herpesvirus | NTR | 100 | 30 |
| | | | papio | | | |
| 695 | 957 | Y86260 | Homo sapiens | Human | 319 | 78 |
| | | | | secreted | | |
| | | | | protein | | |
| | | | | HELHN47, | | |
| 696 | 9572 | gi972940 | Mus Musculus | Elf-1 | 806 | 92 |
| 697 | 9576 | gi3249005 | Homo sapiens | geminin | 448 | 98 |
| 698 | 9586 | gi2887288 | Homo sapiens | mRNA cleavage | 208 | 100 |
| | | | | factor I 25 kDa | | |
| | | | | subunit | | |
| 699 | 9587 | G00995 | Homo sapiens | Human | 726 | 99 |
| | | | | secreted | | |
| | | | | protein, | | |
| 700 | 9592 | gi495273 | Rattus | ribosomal | 202 | 78 |
| | | | norvegicus | protein S15a | | |
| 701 | 9595 | gi7799912 | Homo sapiens | UBASH3A | 453 | 47 |
| | | | | protein | | |
| 702 | 9610 | Y07875 | Homo sapiens | Human | 574 | 100 |
| | | | | secreted | | |
| | | | | protein | | |
| | | | | fragment | | |
| | | | | encoded from | | |
| | | | | gene 24. | | |
| 703 | 9634 | Y73325 | Homo sapiens | HTRM clone | 820 | 99 |
| | | | | 001106 protein | | |
| | | | | sequence. | | |
| 704 | 9639 | G00805 | Homo sapiens | Human | 155 | 67 |
| | | | | secreted | | |
| | | | | protein, | | |
| 705 | 9647 | G03786 | Homo sapiens | Human | 196 | 73 |
| | | | | secreted | | |
| | | | | protein, | | |
| 706 | 9653 | gi3882341 | Homo sapiens | KIAA0810 | 523 | 100 |
| | | | | protein | | |
| 707 | 9654 | G01924 | Homo sapiens | Human | 469 | 100 |
| | | | | secreted | | |
| | | | | protein, | | |
| 708 | 9678 | Y99376 | Homo sapiens | Human PRO1244 | 474 | 100 |
| | | | | (UNQ628) amino | | |
| | | | | acid sequence | | |
| 709 | 9709 | Y11825 | Homo sapiens | Human 5′ EST | 657 | 100 |
| | | | | secreted | | |
| | | | | protein | | |
| 710 | 9722 | gi7677422 | Mus Musculus | GTPase Rab37 | 189 | 75 |
| 711 | 9731 | Y12424 | Homo sapiens | Human 5′ EST | 207 | 100 |
| | | | | secreted | | |
| | | | | protein | | |
| 712 | 9742 | Y57954 | Homo sapiens | Human | 484 | 100 |
| | | | | transmembrane | | |
| | | | | protein HTMPN- | | |
| | | | | 78. | | |
| 713 | 9749 | gi3687829 | Homo sapiens | hT41 | 386 | 65 |
| 714 | 9755 | gi2055295 | Homo sapiens | Similar to a | 2583 | 100 |
| | | | | C. elegans | | |
| | | | | protein in | | |
| | | | | cosmid C14H10 | | |
| 715 | 9762 | G03436 | Homo sapiens | Human | 176 | 61 |
| | | | | secreted | | |
| | | | | protein, | | |
| 716 | 9763 | gi6180011 | Homo sapiens | anaphase- | 1016 | 100 |
| | | | | promoting | | |
| | | | | complex | | |
| | | | | subunit 4 | | |
| 717 | 9784 | G03570 | Homo sapiens | Human | 401 | 96 |
| | | | | secreted | | |
| | | | | protein, | | |
| 718 | 9794 | G00803 | Homo sapiens | Human | 333 | 69 |
| | | | | secreted | | |
| | | | | protein, | | |
| 719 | 9795 | gi2516242 | Mus Musculus | Rab33B | 669 | 94 |
| 720 | 9798 | gi558599 | Homo sapiens | ZID, zinc | 605 | 96 |
| | | | | finger protein | | |
| | | | | with | | |
| | | | | interaction | | |
| | | | | domain | | |
| 721 | 9805 | Y25881 | Homo sapiens | Human | 566 | 96 |
| | | | | secreted | | |
| | | | | protein | | |
| | | | | fragment | | |
| | | | | encoded from | | |
| | | | | gene 61. | | |
| 722 | 9816 | gi532056 | Homo sapiens | protein- | 384 | 100 |
| | | | | tyrosine- | | |
| | | | | phosphatase | | |
| 723 | 9830 | G00857 | Homo sapiens | Human | 539 | 96 |
| | | | | secreted | | |
| | | | | protein, | | |
| 724 | 9836 | G00914 | Homo sapiens | Human | 527 | 100 |
| | | | | secreted | | |
| | | | | protein, | | |
| 725 | 9837 | gi2662099 | Homo sapiens | KIAA0409 | 230 | 67 |
| 726 | 984 | Y29517 | Homo sapiens | Human lung | 833 | 94 |
| | | | | tumour protein | | |
| | | | | SAL-82 | | |
| | | | | predicted | | |
| | | | | amino acid | | |
| | | | | sequence. | | |
| 727 | 9849 | gi7229305 | Homo sapiens | ZNF264, | 140 | 90 |
| | | | | partial cds | | |
| 728 | 9851 | gi5262560 | Homo sapiens | hypothetical | 369 | 64 |
| | | | | protein | | |
| 729 | 9859 | gi3881976 | Homo sapiens | hypothetical | 167 | 93 |
| | | | | protein | | |
| 730 | 9863 | gi7295707 | Drosophila | CG15433 gene | 837 | 78 |
| | | | melanogaster | product | | |
| 731 | 9888 | gi3319677 | Homo sapiens | | 209 | 72 |
| 732 | 989 | gi4557143 | Rattus | zinc finger | 604 | 92 |
| | | | norvegicus | protein RIN ZF | | |
| 733 | 9919 | G01843 | Homo sapiens | Human | 586 | 100 |
| | | | | secreted | | |
| | | | | protein, | | |
| 734 | 9922 | W67869 | Homo sapiens | Human | 551 | 93 |
| | | | | secreted | | |
| | | | | protein | | |
| | | | | encoded by | | |
| | | | | gene 63 clone | | |
| | | | | HHGDB72. | | |
| 735 | 9947 | W78239 | Homo sapiens | Fragment of | 251 | 78 |
| | | | | human secreted | | |
| | | | | protein | | |
| | | | | encoded by | | |
| | | | | gene 3. | | |
| 736 | 9956 | Y36203 | Homo sapiens | Human | 273 | 77 |
| | | | | secreted | | |
| | | | | protein #75. | | |
| 737 | 9961 | Y99357 | Homo sapiens | Human PRO1190 | 650 | 99 |
| | | | | (UNQ604) amino | | |
| | | | | acid sequence | | |
| 738 | 9972 | Y12149 | Homo sapiens | Human 5′ EST | 284 | 100 |
| | | | | secreted | | |
| | | | | protein | | |
| 739 | 9977 | gi10039439 | Homo sapiens | osteoblast | 822 | 98 |
| | | | | differentiation | | |
| | | | | promoting | | |
| | | | | factor | | |

[0382] TABLE 3
Amino Acids

| | | Predicted | Predicted | |
|---|---|---|---|---|
| | | beginning | end | |
| | | nucleotide | nucleotide | |
| | | location | location | |
| | | corre- | corre- | |
| | | sponding | sponding | Amino acid segment containing signal peptide (A = Alanine, |
| | | to first | to first | C = Cysteine, D = Aspartic Acid, E = Glutamic Acid, |
| SEQ | SEQ | amino | amino | F = Phenylalanine, G= Glycine, H = Histidine, I = Isoleucine, |
| ID | ID | acid | acid | K = Lysine, L = Leucine, M = Methionine, N = Asparagine, |
| NO: | NO: | residue | residue | P = Proline, Q = Glutamine, R = Arginine, S = Serine, |
| of | of | of amino | of amino | T = Threonine, V = Valine, W = Tryptophan, Y = Tyrosine, |
| Nucleic | Amino | acid | acid | X = Unknown, * = Stop Codon, / = possible nucleotide deletion, |
| Acids | Acids | sequence | sequence | \ = possible nucleotide insertion) |
| 1 | 740 | 2 | 557 | FVGRLLRLGEALRLRPDPSGGCRLQPALVGETEMSEKENNFPP |
| | | | | LPKFIPVKPCFYQNFSDEIPVEHQVLVKRIYRLWMFYCATLGV |
| | | | | NLIACLAWWIGGGSGTNFGLAFVWLLLFTPCGYVCWFRPVYKA |
| | | | | FRADSSFNFMAFFFIFRSPVCPDRHPGDWLLRLGRVRLAVGNW |
| | | | | ILPVQPGRCRGHA |
| 2 | 741 | 305 | 838 | FLGAGADIFCAYLRMSSKQATSPFACAADGEDAMTQDLTSREK |
| | | | | EEGSDQHVASHLPLHPIMHNKPHSEELPTLVSTIQQDADWDSV |
| | | | | LSSQQRMESENNKLCSLYSFRNTSTSPHKPDEGSRDREIMTSV |
| | | | | TFGTPERRKGSLADVVDTLKQKKLEEMTRTEQEDSSCMEKLLS |
| | | | | KDWKE |
| 3 | 742 | 12 | 1315 | EGYLTGRPTRPVAVRGKSTADLRMMGRSPGFAMQHIVGVPHVL |
| | | | | VRRGLLGRDLFMTRTLCSPGPSQPGEKRPEEVALGLHHRLPAL |
| | | | | GRALGHSIQQRATSTAKTWWDRYEEFVGLNEVREAQGKVTEAE |
| | | | | KVFMVARGLVREAREDLEVHQAKLKEVRDRLDRVSREDSQYLE |
| | | | | LATLEHRMLQEEKRLRTAYLRAEDSEREKFSLFSAAVRESHEK |
| | | | | ERTRAERTKNWSLIGSVLGALIGVAGSTYVNRVRLQELKALLL |
| | | | | EAQKGPVSLQEAIREQASSYSRQQRDLHNLMVDLRGLVHAAGP |
| | | | | GQDSGSQAGSPPTRDRDVDVLSAALKEQLSHSRQVHSCLEGLR |
| | | | | EQLDGLEKTCSQMAGVVQLVKSAAHPGLVEPADGAMPSFLLEQ |
| | | | | GSMILALSDTEQRLEAQVNRNTIYSTLVTCVTFVATLPVLYML |
| | | | | FKAS |
| 4 | 743 | 112 | 745 | NLPPLTPQPGPRLAGSGPSHWFSPLSLPVASKAPGTMAQALGE |
| | | | | DLVQPPELQDDSSSLGSDSELSGPGPYRQADRYGFIGGSSAEP |
| | | | | GPGHPPADLIRQREMKWVEMTSHWEKTMSRRYKKVKMQCRKGI |
| | | | | PSALRARCWPLLCGAHVCQKNSPGTYQELAEAPGDPQWMETIG |
| | | | | RDLHRQFPLHEMFVSPQGHGQQGLLQVLKAYTLYRPEQG |
| 5 | 744 | 99 | 265 | LRGMAAAAAGPAASQRFFQSFSDALIDQDPQAALEVGEPFLLP |
| | | | | PLPAPPPPSSTA |
| 6 | 745 | 210 | 758 | WACFRSAHCSRHLRNRIFMYLYWDKTRSPVCKGPALREERPQP |
| | | | | RLKLEDYKDRLKSGEHLNPDQLEAVEKYEEVLHNLEFAKELQK |
| | | | | TFSGLSLDLLKAQKKAQRREHMLKLEAEKKKLRTILQVQYVLQ |
| | | | | NLTQEHVQKDFKGGLNGAVYLPSKELDYLIKFSKLTCPERNES |
| | | | | LRQTLEGSTV |
| 7 | 746 | 48 | 450 | XAGVQMKLEFLQRKFWAATRQCSTVDGPCTQSCEDSDLDCFVI |
| | | | | DNNGFILISKRSRETGRFLGEVDGAVLTQLLSMGVFSQVTMYD |
| | | | | YQAMCKPSSHHHSAAQPLVSPISAFLTATRWLLQELVLFLLEW |
| | | | | SVWGSX* |
| 8 | 747 | 1 | 469 | CRGRLAQLEEAAVAATMSAGDAVCTGWLVKSPPERKLQRYAWR |
| | | | | KRWFVLRRGRMSGNPDVLEYYRNKHSSKPIRVIDLSECAVWKH |
| | | | | VGPSFVRKEFQNNFVFIVKTTSRTFYLVAKTEQEMQVWVHSIS |
| | | | | QVCNLGHYLEDGAADSMESLSYTRSYLQ |
| 9 | 748 | 242 | 409 | IPAVPLTSCVTVGSYSLSVRDYDPRQGDTVKHYKIRTL\DKRG |
| | | | | FYISP\RSTFSTLQ |
| 10 | 749 | 1 | 1146 | KDSVLNIARGKKYGEKTKRVSSRKKPALKC/TSQKQPALKAIC |
| | | | | DKEDSVPNTATEKKDEQISGTVSSQKQPALKATSDKKDSVSNI |
| | | | | PTEIKDGQQSGTVSSQKQPAWKATSVKKDSVSNIATEIKDGQI |
| | | | | \RGTVSSQRQPALKA\TGDEKDSVSNIAREIKDGEKSGTVSPQ |
| | | | | KQSAQKVIFKKKVSLLNIATRITGGWKSGTEYPENLPTLKATI |
| | | | | ENKNSVLNTATKMKDVQTSTPEQDLEMASEGEQKRLEEYENNQ |
| | | | | PQVKNQIHSRDDLDDIIQSSQTVSEDGDSLCCNCKNVILLIDQ |
| | | | | HEMKCKDCVHLLKIKKTFCLCKRLTELKDNHCEQLRVKIRKLK |
| | | | | NKASVLQKRLSEKEEIKSQLKHETLELEKELCSLRAFAIQQ |
| 11 | 750 | 3 | 892 | SPLRYRAGQSGSTISSSSCAMWRCGGRQGLCVLRRLSGGHAHH |
| | | | | RAWRWNSNRACERALQYKLGDKIHGFTVNQVTSVPELFLTAVK |
| | | | | LTHDDTGARYLHLAREDTNNLFSVQFRTTPMDSTGVPHILEHT |
| | | | | VLCGSQKYPCRDPFFKMLNRSLSTFMNAFTASDYTLYPFSTQN |
| | | | | PKDFQNLLSVYLDATFFPCLRELDFWQEGWRLEHENPSDPQTP |
| | | | | LVFKGVVFNEMKGAFTDNERIFSQHLQNRLLPDHTYSVVSGGD |
| | | | | PLCIPELTWEQLKQFHATHYHPSNARFFTYGNFPLDQH |
| 12 | 751 | 367 | 856 | RGAKAKSAVLPPGPPCSSILILSPPAPLTPRSPGTEATRPTAM |
| | | | | SKSLKKKSHWTSKVHESVIGRNPEGQLGFELKGGAENGQFPYL |
| | | | | GEVKPGKVAYESGSKLVSEELLLEVNETPVAGLTIRDVLAVIK |
| | | | | HCKDPLRLKCVKQGESSGLLSVLPGGGTARGAGQ |
| 13 | 752 | 144 | 442 | SHRPQPDAWRQGNAFQCVQKEKMQVSSAEVRIGPMRLTQDPIQ |
| | | | | VLLIFAKEDSQSDGFWWACDRAGYRCNIARTPESALECFLDKH |
| | | | | HEIIVIDHRQTQN |
| 14 | 753 | 1 | 581 | FRLAGCGHLLVSLLGLLLLLARSGTRALVCLPCDESKCEEPRN |
| | | | | CPGSIVQGVCGCCYTCASQRNESCGGTFGIYGTCDRGLRCVIR |
| | | | | PPLNGDSLTEYEAGVCEDENWTDDQLLGFKPCNENLIAGCNII |
| | | | | NGKCECNTIRTCSNPFEFPSQDMCLSALKRIEEEKPDCSKARC |
| | | | | EVQFSPRCPEDSVLIEGYAPP |
| 15 | 754 | 1 | 219 | FRMAANVGSMFQYWKRFDLQQLQRELDATATVLANRQDESEQS |
| | | | | RKRLIEQSREFKKNTPEVRRVTIVFALKGS |
| 16 | 755 | 313 | 562 | ETLSCRIMDHPSREKDERQRTTKPMAQRSAHCSRPSGSSSSSG |
| | | | | VLMVGPNFRVGKKIGCGNFGELRLGEGLPQVYYFGPCGKY |
| 17 | 756 | 273 | 574 | GCCKD*HSGVIGRSWAMLFASGGFQVKLYDIEQQQIRNALENI |
| | | | | RWASRRSPEGMEVGLFLSVGLVCHILKAMRICDVTFSSDGYCS |
| | | | | ASELVKARPTVAGM |
| 18 | 757 | 3 | 390 | NSRVDDFVSARPKPRPLPRARGMVVVTGREPDSRRQDGAMSSS |
| | | | | DAEDDFLEPATPTATQAGHAL/PPAAT/GSFLRLFPLTSEGLT |
| | | | | SLHACPHCGATKTPCWQPCSVGGTTSPRTPRAGTSSTEMAHTL |
| | | | | EMC |
| 19 | 758 | 98 | 461 | RALWVGGCSGEACGIGMSGLLTDPEQPAQEPRYPGFVLGLDVG |
| | | | | SSVIRCHVYDRAARVCGSSVQKVENLYPQIGWVEIDPDVLWIQ |
| | | | | FVAVIKEAVAGIQNNQIVGLGISTQRATFITWN |
| 20 | 759 | 100 | 731 | GLAAEQSMQFVKLWCGCSGEFPTRLRRRTPLTEAMEGGPAVCC |
| | | | | QDPRAELVERVAAIDVTHLEEADGGPEPTRNGVDPPPRARAAS |
| | | | | VIPGSTSRLLPARPSLSARKISLQERPAGSYLEAQAGPYATGP |
| | | | | ASHISPRAWRRPTIESHHVAISDAEDCVQLNQYKLQSEIGKGA |
| | | | | YGVVRLAYNESEDPRYAMKVLSKKKLLXQYGFPRRPPP |
| 21 | 760 | 2 | 520 | FVYGKPVTLWPTISSVVPSTFLGLGNYEVEVEAEPDVRGPEIV |
| | | | | TMGENDPPAVEAPFSFRSLFGLDDLKISPVAPDADAVAAQILS |
| | | | | LLPLKFFPIIVIGIIALILALAIGLGIHFDCSGKYRCRSSFKC |
| | | | | IELIARCDGVSDCKGEDEYRCVRVGGQNAALQVFTAASRKTKM |
| 22 | 761 | 158 | 470 | SLAMPFGCVTLGDKKNYNQPSEVTDRYDLGQVIKTEEFCEIFR |
| | | | | AKDKTTGKLHTCKKFQKRDGRKVRKAAKNEIGILKMVKHPNIL |
| | | | | QLVDVFVTRKEYFIFLEL |
| 23 | 762 | 1 | 749 | QRRRFRAGLWGGHGLTDGLRRNGGCGCSARVPRVGERLRGHRC |
| | | | | PDPLCLLLDMLFLSFHAGSWESWCCCCLIPADRPWDRGQHWQL |
| | | | | EMADTRSVHETRFEAAVKVIQSLPKNGSFQPTNEMMLKFYSFY |
| | | | | KQATEGPCKLSRPGFWDPIGRYKWDAWSSLGDMTKEEAMIAYV |
| | | | | EEMKKIIETMPMTEKVEELLRVIGPFYEIVEDKKSGRSSDITS |
| | | | | DLGNVLTSTPNAKTVNGICAESSDSGAESEEEEAC |
| 24 | 763 | 3 | 558 | SCFKGRTGGRSGSSGDSSRWARCGRHFSASTEEPPLSQPCSAL |
| | | | | PRSGRRGCAVPSSVTKMLSFFRRTLGRRSMRKHAEKERLREAQ |
| | | | | RAATHIPAAGDSKSIITCRVSLLDGTDVSVDLPKXAKGQELFD |
| | | | | QIMYHLDLIESDYFGLRFMDSAQVAHWLDGTKSIKKQVKIGSP |
| | | | | YCLHLRVKFYSS |
| 25 | 764 | 9 | 424 | ESRERSGNRRGAEDRGTCGLQSPSAMLGAKPHWLPGPLHSPGL |
| | | | | PLVLVLLALGAGNAQEGSEPVLLEGECLVVCEPGRAAAGGPGG |
| | | | | AALGEAPPGRVAFAAVRSHHHEPAGETGNGTSGAIYFDQVLVN |
| | | | | EGGGFDRAS |
| 26 | 765 | 2 | 507 | EDVKSYYTVHLPQLENINSGETRTISHFHYTTWPDFGVPQSPA |
| | | | | SFLNFLFKVRESGSLNPDHGPVVIHRSAGTGRSSTFSVVHTCL |
| | | | | VLMEKGDDINIKQVLLNIRKFQMGLI\QTPDQLRFSYMAITEG |
| | | | | AKCVKGDSSIQKRWKELSKE/DLPPAFDHSPNKIMTEKYNR |
| 27 | 766 | 84 | 852 | LNRQRCGDQVLVPGTGLAAILRTLPMFHDEEHARARGLSEDTL |
| | | | | VLPPASRNQRILYTVLECQPLFDSSDMTIAEWVCLAQTIKRHY |
| | | | | EQYHGFVVIHGTDTMAFAASMLSFMLENLQKTVILTGAQVPIH |
| | | | | ALWSDGRENLLGALLMAGQYVIPEVCLFFQNQLFRGNRATKVD |
| | | | | ARRFAAFCSPNLLPLATVGADITINRELVRKVDGKAGLVVHSS |
| | | | | MEQDVGLLRLYPGIPAALVRAFLQPPLKGVVMETFGSGNG |
| 28 | 767 | 992 | 210 | LFRLAPGFLRSLARQGYHQIWAFPFLPSGATATWPAASRSRSL |
| | | | | AARSLPRSPARPGPNDALLGEHDFRGQGVPAQRFRFSEEPGPG |
| | | | | ADGAVLEVHVPQIGAGVSLPGILAAKCGAEVILSDSSELPHCL |
| | | | | EVCRQSCQMNNLPHLQVVGLTWGHISWDLLAIPPQDIILASDV |
| | | | | FFEPEDFEDILATIYFLMHKNPKVQLWSTYQVRSADWSLEALL |
| | | | | YKWDMKCVHIPLESFDADKEDIAESTLPGRHTVEMLVISFAKD |
| | | | | SL |
| 29 | 768 | 23 | 624 | SFIYKHTHRARFGPRAIVASPALTAGPHVSLTASCRVGMWVSC |
| | | | | SPSPFLHPTNTLVAVLERDTLGIREVRLFNAVVRWSEAECQRQ |
| | | | | QLQVTPENRRKVLGKALGLIRFPLMTIEEFAAGNRAPAQGLVW |
| | | | | EGSGTQVGIW\CTEDSAPEFTAESLADAWHIQIGRNLACEDAS |
| | | | | T\WAIC*PRPGSVPTVRTARPRLSCLSSCF |
| 30 | 769 | 100 | 2 | MASTQDAELAVSRXRAIALXPGXQSXXPSQKKK |
| 31 | 770 | 158 | 1957 | LLKSCGVLLSGVCIPCEGKGPTVLVIQTAVPQDRPTKSSMRSA |
| | | | | AKPWNPAIRAGGHGPDRVRPLPAASSGMKSSKSSTSLAFESRL |
| | | | | SRLKRASSEDTLNKPGSTAASGVVRLKKTATAGAISELTESRL |
| | | | | RSGTGAFTTTKRTGIPAPREFSVTVSRERSVPRGPSNPPKSVS |
| | | | | SPTSSNTPTPTKHLRTPSTKPKQENEGGEIC\VRLSPK/FRELL |
| | | | | AEAKAKDSEINRLRSELKKYKEKRTLNAEGTDALGPNVDGTSV |
| | | | | SPGDTEPMIRALEEKNKNFQKELSDLEEENRVLKEKLIYLEHS |
| | | | | PNSEGAASHTGDSSCPTSITQESSFGSPTGNQLSSDIDEYKKN |
| | | | | IHGNALRTSGSSSSDVTKASLSPDASDFEHITAETPSRPLSST |
| | | | | SNPFKSSKCSTAGSSPNSVSELSLASLTBKIQKMEENHHSTAE |
| | | | | ELQATLQELSDQQQMVQELTAENEKLVDEKTILETSFHQHRER |
| | | | | AEQLSQENEKLMNLLQERVKNEEPTTQEGKIIELEQKCTGILE |
| | | | | QGRFEREKLLNIQQQLTCSLRKVEEENQGALEMIKRLKEENEK |
| | | | | LNEFLELERHNNNNMAKTLEECRVTLEGLKMENGSLKSHLQG |
| 32 | 771 | 203 | 514 | SQMHRLIFVYTLICANFCSCRDTSATPQSASIKALRNANLRRD |
| | | | | ESNHLTDLYRRDETIQVKGNGYVQSPRFPNSYPRNLLLTWPLH |
| | | | | SQENTRIQLVPDNQFGL |
| 33 | 772 | 59 | 713 | PFKKMTDLLRSVVTVIDVFYKYTKQDGECGTLSKGELKELLEK |
| | | | | ELHPVLKNPDDPDTVDVIMHMLDRDHDRRLDFTEFLLMIFKLT |
| | | | | MACNKVLSKEYCKASGSKKHRRGHRHQEEESETEEDEEDTPGH |
| | | | | KSGYRHSSWSEGEEHGYSSGHSRGTVKCRHGSNSRRLGRQGNL |
| | | | | SSSGNQEGSQKRYHRSSCGHSWSGGKDRHGSSSVELRERINKS |
| | | | | HIK |
| 34 | 773 | 209 | 601 | VPKISGPDHIDFIPWDQLFMASSSSVTEFLVLGFSSLGELQLV |
| | | | | LFAVFLCLYLIILSGNIIIISVIHLDHSLHTPMYFFLGILSIS |
| | | | | EIFYTTVILPKMLINLFSVFRTLSFVSCATQMFYEIVGPGTQE |
| | | | | R |
| 35 | 774 | 373 | 987 | DHSTETPGIPAAEPVSHGTGKLERAPTLPAGAELPAPAAVPCP |
| | | | | TL*VC/LYPQLLGLSVATMVTLTYFGAHFAVIRRASLEKNPYQ |
| | | | | AVHQWGTQQRLIQHPESGSEGQSLLGPLRAFSAFLSLVGLLTL |
| | | | | GAVLSAAATVREQQGLMAGGFLCFSLAFCAQVQVVFWRLHSPT |
| | | | | QVEDAMLDTYDLVYEQAMKGTSHVRRQELAAIQ |
| 36 | 775 | 102 | 466 | QPGYSEYDKNRGQGMLLNMMCGRQLSAISLCLAVTFAPLFNAQ |
| | | | | ADEPEVIPGDSPVAVSEQGEALPQAQATAIMAGIQPLPEGAAE |
| | | | | KARTQIESQLPAGYKPVYLNQLQLLYAARGISCSV |
| 37 | 776 | 2 | 430 | RTRAADVYVFSLTGKSRNVSSSTVRRSAVGGMSALALFDLLKP |
| | | | | NYALATQVEFTDPEIVAEYITYPSPNGHGEVRGYLVKPAKMSG |
| | | | | KTPAVVVVHENRGLNPYIEDVARRVAKAGYIALAPDGLSSVGG |
| | | | | YPGNDIKVVSAAA |
| 38 | 777 | 106 | 556 | VKQRHGNSLLTTETKCISCRLGVPLSPQRRFQAIRIEEVKLRW |
| | | | | FAFLIVLLAGCSSKHDYTNPPWNAKVPVQRAMQWMPISQKAGA |
| | | | | AWGVDPQLITAIIAIESGGNPNAVSKSNAIGLMQLKASTSGRD |
| | | | | VYRRMGWSGEPTTSEILKNSSR |
| 39 | 778 | 3 | 892 | HAAGIRHEAKPKRSFYAARDLYKYRHQYPNFKDIRYQNDLSNL |
| | | | | RFYKNKIPFKPDGVYIEEVLSKWKGDYEKLEHNHTYIQWLFPL |
| | | | | REQGLNFYAKELTTYEIEEFKKTKEAIRRFLLAYKMMLEFFGI |
| | | | | KLTDKTGNVARAVNWQERFQHLNESQHNYLRITRILKSLGELG |
| | | | | YESFKSPLVKFILHEALVENTIPNIKQSALEYFVYTIRDRRER |
| | | | | RKLLRFAQKHYTPSENFIWGPPRKEQSEGSKAQKMSSPLASSH |
| | | | | NSQTSMHKKAKDSKNSSSAVHLNSKTAEDKKVAPKEPV |
| 40 | 779 | 123 | 395 | ELQVFQPIGGMSDSGSQLGSMGSLTMKSQLQITVISAKLKENK |
| | | | | KNWFGPSPYVEVTVDGQSKKTEKCNNTNSPKWKQPLTVIVTPV |
| | | | | SKLH |
| 41 | 780 | 173 | 438 | IETLSFVIRNWNTHAMSKPIVMERGVKYRDADKMALIPVKNVA |
| | | | | TEREALLRKPEWMKIKLPADSTRIQGIKAAMRKNGLHSVCEEA |
| | | | | SC |
| 42 | 781 | 287 | 393 | PRMVLGKPQTDPTLEWFLSHCHIHKYPSKSTLIPQ |
| 43 | 782 | 119 | 556 | GLRISVQERIKACFTESIQTQIAAAEALPDAISRAAMTLVQSL |
| | | | | LNGNKILCCGNGTSAANAQHFAASMINRFETERPSLPAIALNT |
| | | | | DNVVLTAIANDRLHDEVYAKQVRALGHAGDVLLAISTRGNSRD |
| | | | | IVKAVEAAVTRDTTIV |
| 44 | 783 | 248 | 554 | KQTQHAPGMMKKYLALALIAPLLISCSTTKKGDTYNEAWVKDT |
| | | | | NGFDILMGQFAHNIENIWGFKEVVIAGPKDYVKYTDQYQTRSH |
| | | | | INFDDGTITIEPIPGT |
| 45 | 784 | 77 | 311 | TDRTALNPGQESAMNRLFSGRSDMPFALLLLAPSLLLLGGLVA |
| | | | | WPMVSNIEISFLRLPLNPNIESTFVGVSNYVRILS |
| 46 | 785 | 184 | 627 | KELVDEKSERGRAMDPVSQLASAGTFRVLKEPLAFLRALELLF |
| | | | | AIFAFATCGGYSGGLRLSVDCVNKTESNLSIDIAFAYPFRLHQ |
| | | | | VTFEVPTCEGKERQKLALIGDSSSSAEFFVTVAVFAFLYSLAA |
| | | | | TGRYIFFHNKNRENNRGPL |
| 47 | 786 | 3 | 742 | LGTVSYGADTMDEIQSHVRDSYSQMQSQAGGNNTGSTPLRKAQ |
| | | | | SSAPKVRKSVSSRIHEAVKAIVLCHNVTPVYESRAGVTEETEF |
| | | | | AEADQDFSDENRTYQASSPDEVALVQWTESVGLTLVSRDLTSM |
| | | | | QLKTPSGQVLSFCILQLFPFTSESKRMGVIVRDESTAEITFYM |
| | | | | KGADVAMSPIVQYNDWLEEECGNMAREGLRTLVVAKKAITEEQ |
| | | | | YQDFEVSRLPGIPSSYDGAFLTLKLVLPVFV |
| 48 | 787 | 864 | 335 | EGPHR\RLFQMVKA/LQEAPEDPNQILIGYSRGLVVIWDLQGS |
| | | | | RVLYHFLSSQQLENIWWQRDGRLLVSCHSDGSYCQW\PVSSEA |
| | | | | QQPEPLRSLVPYGPFPCKAITRILWLTTRQGLPFTIFQGGMPR |
| | | | | ASYGDRHCISVIHDGQQTAFDFTSRVIGFTVLTEADPAASRRA |
| | | | | SGVGAQG |
| 49 | 788 | 410 | 951 | KQGLEVRDLHFKEITSGRALLRVACKRPSMVPGGQLQPAGAGA |
| | | | | QARITGLSPALWGARVHGWIPELPAGLPPGACLWPLIPACPSR |
| | | | | HWGWVSAPVKG/WAQAILGLALCL/RGEHRGLGAGVSKVRSLK |
| | | | | MDRKVWTETLIEVGMPLLATDTWGLPHSTAVIVSQPPPYLSDH |
| | | | | STLELERDPLS |
| 50 | 789 | 1 | 437 | LSCNSEQALLSLVPVQRELLRRRYQSSPAXPDSSFYKGLGTCP |
| | | | | SQLRLSEPPPTPRHLSVASVSHHMFPSHRSLCPHLPDPFAAPF |
| | | | | PSDNLPYTLQSPFPSPPPATPSDHALILHH\DLNGGPDDPLQQ |
| | | | | TGQLFGGLVRDIRRRYP |
| 51 | 790 | 1 | 198 | SPSSKLVGMWWAGRAGSSRTTSVSLLCPL/SAPFGASNLLVNP |
| | | | | LEPQNADKIKIKIADLGNACWVV |
| 52 | 791 | 3 | 435 | RVDPRVRAPRCGDKIKNHMY\KCDCGSLKDCASDRCCETSCTL |
| | | | | SLGSVCNTGLCCHKCKYAAPGVVCRDLGGICDLPEYCDGKKEE |
| | | | | CPNDIYIQDGTPCSAVSVCIRGNCSDRDMQCQALFGYQVKDGS |
| | | | | PACYRKLNRIGNRFGT |
| 53 | 792 | 1 | 728 | PGRPTRPDASLAQ/DPRTTMFRIPEFKWSPMHQRLLTDLLFAL |
| | | | | ETDVHVWRS\HSTKSVMDFVNSNENIIFVHNTIHLISQMVDNI |
| | | | | IIACGGILPLLSAATSPTGSKTELENIEVTQGMSAETAVTFLS |
| | | | | RLMAMVDVLVFASSLNFSEIEAEKNMSSGGLMRQCLKLVCCVA |
| | | | | VRNCLECRQRQRDRGNKSSHGSSKPQEVPQSVTATAASKTPLE |
| | | | | NVPGNLSPIKDPDRLLQDVDINRLRAVVF |
| 54 | 793 | 2230 | 990 | NSSGVKLLQALGLSPGNGKDHSILHSRNDLEEAFIHFMGKGAA |
| | | | | AERFFSDKETFHDIAQVASEFPGAQHYVGGNAALIGQKFAANS |
| | | | | DLKVLLCGPVGPKLHELLDDNVFVPPESLQEVDEFHLILEYQA |
| | | | | GEEWGQLKAPHANRFIFSHDLSNGAMNMLEVFVSSLEEFQPDL |
| | | | | GGLSGLHMMEGQSKELQRKRLLEVVTSISDIPTGIPV\HLELG |
| | | | | \SMTNRELMSSIV\LQQVFPAVTSLGLNEQELLFLTQSASGPH |
| | | | | SSLSSWNGVPDVGMVSDILFWILKEHGRSKSRASDLTRIHFHT |
| | | | | LVYHILATVDGHWANQLAAVAAGARVAGTQACATETIDTSRVS |
| | | | | LRAPQEFMTSHSEAGSRIVLNPNKPVVEWHREGISFHFTPVLV |
| | | | | CKDPIRTVGLGDAISAEGLFYSEVHPHY |
| 55 | 794 | 249 | 3 | DDSSGWGLEQLVVRWSLALWPRLECSGMISAHCNLCL/LGSSD |
| | | | | SPASAPRVAGITDVCHHAWLVFVFLVVMGFPHVGHVGLELL |
| 56 | 795 | 2 | 1176 | LGEVLKCQQGVSSLAFALAFLQRMDMKPLVVLGLPAPTAPSGC |
| | | | | LSFWEAKAQLAKSCKVLVDALRHNAAAAVPFFGGGSVLRAAEP |
| | | | | APHASYGGIVSVETDLLQWCLESGSIPILCPIGETAARRSVLL |
| | | | | DSLEVTASLAKALRPTKIIFLNNTGGLRDSSHKVLSNVNLPAD |
| | | | | LDLVCNAEWVSTKERQQMRLIVDVLSRLPHHSSAVITAASTLL |
| | | | | TELFSNKGSGTLFKNAERMLRVRSLDKLDQGRLVDLVNASFGK |
| | | | | KLRDDYLASLRPRLHSIYVSEGYNAAAILTMEPVLGGTPYLDK |
| | | | | FVVSSSRQGQGSGWMLWECLRRDLQTLFWRSRVTNPINPWYFK |
| | | | | HSDGSFSNKQWIFFWFGLADIRDSYELVNHAKGLPDSFHKPAS |
| | | | | DPGS |
| 57 | 796 | 755 | 374 | YHAPALQPGQQSKTLSQEKKNFFRPGAVAHTCNPSTLGGRGGR |
| | | | | ITRSGDRDHPG*HGETPSLLKIQKKLAGRDGGRL*SQLLGRLR |
| | | | | QENGVNPGGGGCSEPRLRHCTPAW*QSETISRKKRKKERKY |
| 58 | 797 | 2 | 476 | FRPIGIIRQALCSADGHQRRILTLRLGLLVIPFLPASNLFFRV |
| | | | | GFVVPSVGCCVMLLFGFG/ALRKHTEKKKLIAAVVLGILLS/N |
| | | | | DAERLRCAVRGGEWRSE/EAVFRGAVSVCPLSAEVRCNIGRNL |
| | | | | AAKGNQTGAIRYHREAVSLNPKTKSSTREFRPC |
| 59 | 798 | 3 | 711 | KIADFGFSNLFTPGQLLKTWCGSPPYAAPELFEGKEYDGPKVD |
| | | | | IWSLGVVLYVLVCGALPFDGSTLQNLRARVLSGKFRIPFFMST |
| | | | | ECEHLIRHMLVLDPNKRLSMEQICKHKWMKLGDADPNFDRLIA |
| | | | | ECQQLKEERQVDPLNEDVLLAMEDMGLDKEQTLQSLRSDAYDH |
| | | | | YSAIYSLLCDRHKRHKTLRLGALPSMPRALGLSSTSQYP\AEQ |
| | | | | AGTAMNISVPQVQLINPENQIV |
| 60 | 799 | 2 | 344 | AREFLGHRASITWS*ARVHHRFPKAEVA*P/SLLRTDLTEDRT |
| | | | | KCCHGDLLECADDRADLVEDIWENQDSISTILIECCEKPLLEK |
| | | | | SHCIAEVENDEMPADLPSLAADFVESKDV |
| 61 | 800 | 142 | 594 | VPPKMKRGTSLHSRRGKPEAPKGSPQINRKSGQEMTAVMQSGR |
| | | | | PRSSSTTDAPTGSAMMEIACAAAAAAAACLPGEEGTAERIERL |
| | | | | EVSSLAQTSSAVASSTDGSIHTDSVDGTPDPQRTKAAIAHLQQ |
| | | | | KILKLTEQIKIAQTARRNRRPGS*KDCTP*KCLRKSDEALNRV |
| | | | | LQQI\RVPPKMKRGTSLHSRRGKPEAPKGSPQINRKSGQEMTA |
| | | | | VMQSGRPRSSSTTDAPTGSAMMEIACAAAAAAAACLPGEEGTA |
| | | | | ERIERLEVSSLAQTSSAVASSTDGSIHTDSVDGTPDPQRTKAA |
| | | | | IAHLQQKILKLTEQIKIAQTARRNRRPG |
| 62 | 801 | 232 | 1299 | MQTIERLVKERDDLMSALVSVRSSLADTQQREASAYEQVKQVL |
| | | | | QISEEANFEKTKALIQCDQLRKELERQAERLEKELASQQEKRA |
| | | | | IEKDMMKKEITKEREYMGSKMLILSQNIAQLEAQVERVTKEKI |
| | | | | SAINQLEEIQSQLASREMDVTKVCGEMRYQLNKTNMEKDEAEK |
| | | | | EHREFRAKTNRDLEIKDQEIEKLRIELDESKQHLEQEQQKAAL |
| | | | | AREECLRLTELLGESEHQLHLTRQEKDSIQQSFSKEAKAQALQ |
| | | | | AQQREQELTQKIQQMEAQHDKTENEQYLLLTSQNTFLTKLKEE |
| | | | | CCTLAKKLEQISQKTRSEIAQLSQEKRYTYDKLGKLQRRNEEL |
| | | | | EEQCVQHGRST* |
| 63 | 802 | 3 | 334 | SYPVWWNSPLTAEVPPELLAAAGFFHTGHQDKVRCFFCYGGLQ |
| | | | | SWKRGDDPWTEHAKWFPSCQFLLRSKGRDFVHSVQETHSQLLG |
| | | | | SWDPWEEPEDAAPVAPSVPASGYPELPTPRREVQSESAQEPGG |
| | | | | VSPAEAQRAWWVLEPPGARDVEAQLRRLQEERTCKVCLDRAVS |
| | | | | IVFVPCGHLVC\AECAPGLQLCPI\CRSPCGPLRPCLWVP |
| 64 | 803 | 70 | 456 | MCSYREKKAEPQELLQLDGYTVDYTDPQPGLEGGRAFFNAVKE |
| | | | | GDTVIFASDDEQDRILWVQAMYRATGQSHKPVPPTQVQKLNAK |
| | | | | GGNVPQLDAPISQFYADRAQKHGMDEFISSNPCNFDHASLFEM |
| | | | | * |
| 65 | 804 | 2 | 1376 | KQLIVLGNKVDLLPQDAPGYRQRLRERLWEDCARAGLLLAPGH |
| | | | | QGPQRPVKDEPQDGENPNPPNWSRTVVRDVRLISAKTGYGVEE |
| | | | | LISALQRSWRYRGDVYLVGATNAGKSTLFNTLLESDYCTAKGS |
| | | | | EAIDRATISPWPGTTLNLLKFPICNPTPYRMFKRHQRLKKDST |
| | | | | QAEEDLSEQEQNQLNVLKKHGYVVGRVGRTFLYSEEQKDNIPF |
| | | | | EFDADSLAFDMENDPVMGTHKSTKQVELTAWDVKDAHWFYDTP |
| | | | | GITKENCILNLLTEKEVNIVLPTQSIVPRTFVLKPGMVLFLGA |
| | | | | IGRIDFLQGNQSAWFTVVASNILPVHITSLDRADALYQKHAGH |
| | | | | TLLQIPMGGKERMAGFPPLVAEDIMLKEGLGASEAVADIKFSS |
| | | | | AGWVSVTPNFKDRLHLRGYTPEGTVLTVRPPLLPYIVNIKGQR |
| | | | | IKKSVAYKTKKPPSLMYNVRKKKGKINV |
| 66 | 805 | 1 | 874 | STVASMMHRQETVECLRKFNARRKLKGAILTTMLVSRNFSAAK |
| | | | | SLLNKKSDGGVKPQSNNKNSLVSPAQEPAPLQTAMEPQTTVVH |
| | | | | NATDGIKGSTESCNTTTEDEDLKAAPLRTGNGSSVPEGRSSRD |
| | | | | RTAPSAGMQPQPSLCSSAMRKQEIIKITEQLIEAINNGDFEAY |
| | | | | TKICDPGLTSFEPEALGNLVEGMDFHKFYFENLLSKNSKPIHT |
| | | | | TILNPHVHVIGEDAACIAYIRLTQYIDGQGRPSNPAKSE\TR |
| | | | | VWH\RR\DGKWLNVHYHCSGAPCPHRCSELSHRGF |
| 67 | 806 | 3 | 1714 | LPKNVVFVLDSSASMVGTKLRQTKDALFTILHDLRPQDRFSII |
| | | | | GFSNRIKVWKDHLISVTPDSIRDGKVYIHHMSPTGGTDINGAL |
| | | | | QRAIRLLNKYVAHSGIGDRRVSLIVFLTDGKPTVGETHTLKIL |
| | | | | NNTREAARGQVCIFTIGIGNDVDFRLLEKLSLENCGLTRRVHE |
| | | | | EEDAGSQLIGFYDEIRTPLLSDIRIDYPPSSVVQATKTLFPNY |
| | | | | FNGSEIIIAGKLVDRKLDHLHVEVTASNSKKFIILKTDVPVRP |
| | | | | QKAGKDVTGSPRPGGDGEGDTNHIERLWSYLTTKELLSSWLQS |
| | | | | DDEPEKERLRQRAQALAVSYRFLTPFTSMKLRGPVPRMDGLEE |
| | | | | AHGMSAAMGPEPVVQSVRGAGTQPGPLLKKPYQPRIKISKTSV |
| | | | | DGDPHFVVDFPLSRLTVCFNIDGQPGDILRLVSDHRDSGVTVN |
| | | | | GELIGAPAPPNGHKKQRTYLRTITILINKPERSYLEITPSRVI |
| | | | | LDGGDRLVLPCNQSVVVGSWGLEVSVSANANVTVTIQGSIAFV |
| | | | | ILIHLYKKPAPFQRHHLGFYIANSEGLSSNCRVFCESGILIQE |
| | | | | LTQQSVAVAGR |
| 68 | 807 | 2 | 841 | FFLEQVSQYTFAMCSYREKKSEPQELMQLEGYTVDYTDPHPGL |
| | | | | QGGCMFFNAVKEGDTVIFASDDEQDRILWVQAMYRATGQSYKP |
| | | | | VPAIQTQKLNPKGGTLHADAQLYADRFQKHGMDEFISANPCKL |
| | | | | DHAFLFRILQRQTLDHRLNDSYSCLGWFSPGQVFVLDEYCARY |
| | | | | GVRGCHRHLCYLAELMEHSENGAVIDPTLLHYSFAFCAS\HVH |
| | | | | GNRPDGIGTVSVEEKERFEEIKERLSSLLENQISHFRYCFPFG |
| | | | | RPEGALKATLSLLERVLMKDIA |
| 69 | 808 | 2 | 757 | DGLLHEVLNGLLDRPDWEEAVKMPVGILPCGSGNALAGAVNQH |
| | | | | GGFEPALGLDLLLNCSLLLCRGGGHPLDLLSVTLASGSRCFSF |
| | | | | LSVAWGFVSDVDIQSERFRALGSARFTLGTVLGLATLHTYRGR |
| | | | | LSYLPATVEPASPTPAHSLPRAKSELTLTPDPAPPMAHSPLHR |
| | | | | SVSDLPLPLPQPALASPGSPEPLPILSLNGGGPELAGDWGGAG |
| | | | | DAPLSPDPQLSSPPGSPKAALHSPV*KKAPVIPPDM |
| 70 | 809 | 3 | 530 | KGVPTLLMAAGSFYDILAITGFNTCLGIAFSTGSTVFNVLRGV |
| | | | | LEVVIGVATGSVLGFFIQYFPSRDQDKLVCKRTFLVLGLSVLA |
| | | | | VFSSVHFGFPGSGGLCTLVMAFLAGMGWTSEKAEVEKIIAVAW |
| | | | | DIFQPLLFGLIG\AEVSI\SSLRPETVGLCVATVGI\AVLIRI |
| | | | | FDYIF |
| 71 | 810 | 228 | 541 | LLKEVVVQASPVCKTCCSQLVRTPVTFTEVQNV/CRCSAGYLI |
| | | | | SVCSYTSSDHNQCYAGTASLALLWIGGILKGCLLWKQFRWTER |
| | | | | SHWNFGYWALWSPGNGNGC |
| 72 | 811 | 173 | 404 | ICTSTYLQIFPGKPSCFMCKGRLMCIYFILWYLGHYTSLHWNW |
| | | | | CRYISDPNVD/ACPDPRNAEVSMTHTVPALMELID |
| 73 | 812 | 2 | 586 | LESLPGFKEIVSRGVKVDYLTPDFPSLSYPNYYTLMTGRHCEV |
| | | | | HQMIGNYMWDPTTNKSFDIGVNKDSLMPLWWNGSEPLWVTLTK |
| | | | | AKRKVYMYYWPGCEVEILGVRPTYCLEYKNVPTDINFANAVSD |
| | | | | ALDSFKSGRADLAAIYHERIDVEGHHYGPASPQRKDALKA\VD |
| | | | | TVLKYMTKWIQERGLQDRLNVII |
| 74 | 813 | 2 | 348 | ARDFHPKQTLDFLRSDMANSKITEEVKRSIAQQYLDLTVA/LE |
| | | | | QVDPDAEVDAAPSTTSSCGH*DSHAGS*RVLSLLGD*GPA*TG |
| | | | | ANSMAGKLLLVAWLGFPDPFWGKELSDPAFK |
| 75 | 814 | 2 | 366 | KQSGDVTCNCTDGRLAPSCLTCVGHCIFGGYCTMNSKMMPECQ |
| | | | | SPPHMTGPRCEEHVFSQHQPGHITSILIPML*LLLLVLVAGVI |
| | | | | FCHKRRVQGAKGFQHQRMTNGAMNAQIANPTKYMY |
| 76 | 815 | 420 | 681 | TVENAGRWL*EEAEIQAELERLERVRNLHIRELKRINNEDNSQ |
| | | | | FKDHPTLNERYLLLHLLGRGGFSEVYKVMYGLFWFFYTNVARI |
| 77 | 816 | 37 | 428 | MCEEFLVMGKGCSCVF*ILLSNPQMWWLNDSNPETDNRQESPS |
| | | | | QENIDRVSD/MAFVPSAWTASGGVAWGNLGESGSRTGGVRAET |
| | | | | LAPRLQV*PAHLRGHPRSNRGQGRPPWKAGKLGKCQEVLFRFA |
| | | | | AF |
| 78 | 817 | 1 | 358 | FRAMFLAVQHDCRPMDKSAGSGHKSEEKREKMKRTLLKDWKTR |
| | | | | LSYFLQNSSTPGKPKTGKKSKQQAFIK*VENPELANINS*LLN |
| | | | | *KGEL**A*ANIQNLSCRPSPEEAQLWSEAFDE |
| 79 | 818 | 1 | 169 | GFFNFSSPKLKGWKINSSLVLEIRKNILRFLDAERDVSVVKSS |
| | | | | FPSKDARHSSVHR*FTQLHWGPPSHTPARP*RGFFNFSSPKLK |
| | | | | GWKINSSLVLEIRKNILRFLDAERDVSVVKSSFPSKDARHSSV |
| | | | | HR |
| 80 | 819 | 55 | 310 | RIDDQQELKRVT*YSQKEYTKKKLHKKCNIIQADIKPDNILDN |
| | | | | ESITILKLSDFGSASHVADNDITPSSSQTTSAASSPPRTLRR |
| 81 | 820 | 1 | 134 | SSKPWD*SLAPKHSG*TKNMDCYCIIPTCIGRERCYGTCIGDT |
| | | | | V |
| 82 | 821 | 187 | 360 | NSSKKLVMEHQWKKYLRRNYQRMLNRLITLIGSCGVL*LISTI |
| | | | | PTSRLKFLKETGHGTPMEEIPEEELSEDVEQIDHADRELRRGQ |
| | | | | NLRCKGIHRLPTHIQVGQN |
| 83 | 822 | 208 | 723 | KWMLLHSFKIFCLSLYPQL*CPFEFFSHSATIFHELVYKQTKI |
| | | | | ISSNQELIYEGRRLVLEPGRLAQHFPKTTEENPIFVVSREPLN |
| | | | | TIGLIYEKISLPKVHPRYDLDGDASMAKAITGVVCYACRIAST |
| | | | | LLLYQELMRKGIRWLIELIKDDYNETVHKKTEVVITLGFLVSR |
| 84 | 823 | 1 | 314 | GTRKMGPTVSPICLPGTWGDYNLMDGDLGLISGWGRTEKRDRA |
| | | | | DRLKAGRSPAAG*RKWEPGRDDPTWEESEEDVHKSKWTRCVDE |
| | | | | KGA*C*TDNKRPLRCGVT |
| 85 | 824 | 3 | 302 | HELENLIKSAHSYSLY*G*YLHGA*TAEPEASFCPRRGWNRQA |
| | | | | GAAGSRMNFRPGVLSSRQLGLPGPPDGPDYTVYYPFHRLAMVT |
| | | | | AASRLEREHLTHL |
| 86 | 825 | 87 | 422 | PVPLPHPILEVCPGQ*EPQSAISLTAFQVQAGASRASPGPPAP |
| | | | | SSSKPGRKAKVASPCPDRPAPPPT*PRPAAAPGSESSPRPPRP |
| | | | | RTGRRQQRAHARRAAARTAPWRPSC |
| 87 | 826 | 3 | 289 | HEGRRRGWASASQRFLRNWAFLTPSKVRRLKGQKAFGKLPSHS |
| | | | | DTSLTSDLGFHHRFNPNASSSFKPSGTKFAIQYGTGRVDGILS |
| | | | | EDKLTVSGL |
| 88 | 827 | 3 | 101 | GRNIMHYPNGHAICIANGHCIIL*NSHNIKVWV |
| 89 | 828 | 1 | 535 | INLGNTCYMNSVI*ALFMATDFRRQVLSLNLNGCNSLMKKLQH |
| | | | | LFAFLAHTQREAYAPRIFFEASRPPWFTPRSQQDCSEYLRFLL |
| | | | | DRLHEEEKILKVQASHKPSEILECSETSLQEVASKAAVLTETP |
| | | | | RTSDGEKTLIEKMFGGKLRTHIRCLNCTSTSQKVEAFTDLSLA |
| | | | | FWPSSS |
| 90 | 829 | 1 | 434 | ARDDPRVRLSLSPNFF*LASKLGKQWTPLIILANSLSGTNMGE |
| 91 | 830 | 3 | 782 | MHRIKLNDRMTFPEELDMSTFIDVEDEKSPQTESCTDSGAENE |
| | | | | GSCHSDQMSNDFSNDDGVDEGICLETNSGTEKISKSGLEKNSL |
| | | | | IYELFSVMVHSGSAAGGHYYACIKSFSDEQWYSFNDQHVSRIT |
| | | | | QEDIKKTHGGSSGSRGYYSSAFASSTNAYMLIYRLKDPARNAK |
| | | | | FLEVDEYPEHIKNLVQKERELEEQEKRQREIERNTCKIKLFCL |
| | | | | HPTKQVMMED*IEVHKDKTLKEAVEMAYKMMDLEEVIPLDCCR |
| | | | | L |
| 92 | 831 | 2 | 604 | SVMPVPALCLLWALAMVTRPASAAPMGGPELAQHEELTLLFHG |
| | | | | TLQLGQALNGVYRTTEGRLTKARNSLGLYGRTIELLGQEVSRG |
| | | | | RDAAQELRASLLETQMEEDILQLQAEATAEVLGEVAQAQKVLR |
| | | | | DSVQRLEVQLRSAWLGPAYREFEVLKAHADKQSHILWALTGHV |
| | | | | QRQRREMVAQQHRLRQIQERLHTAALPA |
| 93 | 832 | 16 | 690 | ITSVDPRVRGNASTGYGKIWLDDVSCDGDESDLWSCRNSGWGN |
| | | | | NDCSHSEDVGVICSDASDMELRLVGGSSRCAGKVEVNVQGAVG |
| | | | | ILCANGWGMNIAEVVCRQLECGSAIRVSREPHFTERTLHILMS |
| | | | | NSGCAGGEASLWDCIRWEWKQTACHLNMEASLICSAHRQPRLV |
| | | | | GADMPCSGRVEVKHAHTWRSVCDSDFSLHAANVLCRELNCGDA |
| | | | | ISLSVGDHFG |
| 94 | 833 | 108 | 727 | SNYPSSRFRVAGITGVKLGMRSIPIATACTIYHKFFCETNLDA |
| | | | | YDPYLIAMSSIYLAGKVEEQHLRTRDIINVSNRYFNPSGEPLE |
| | | | | LDSRFWELRDSIVQCELLMLRVLRFQVSFQHPHKYLLHYLVSL |
| | | | | QNWLNRHSWQRTPVAVTAWALLRDSYHGALCLRFQAQHIAVAV |
| | | | | LYLALQVYGVEVPAEVEA/DEAVGWQIYAMDTEIP |
| 95 | 834 | 118 | 376 | RGSRHAVHGWAFGLLFINKESVVMAYLFTTFNAFQGVFIFVFH |
| | | | | CALQKKVRSRRGPGSQPPLETFPGYPGEGGEGGGDSGAPSSPQ |
| 96 | 835 | 3 | 333 | ARKDDLPPNMRFHEEKRLDFEWTLKAG*EKG*PSK*NKGWEGQ |
| | | | | E***TVRD*GIS**VKPQHLS*\ALQMALKRVTLLSSWNCLE |
| | | | | DFDQIFWGQKSALAGQWFPEVSIIP |
| 97 | 836 | 740 | 951 | GKQQRETLRRPSPTISVQRAGSPEHSSASH*HSPCPAPGQRVL |
| | | | | PTALCTLMTSKHFHGCPLAGQGRAVTL |
| 98 | 837 | 81 | 1503 | GVCGLPRFCGSIILCHYEMSSLGASFVQXKFDDLQFFENCGGG |
| | | | | SFGSVYRAKWISQDKEVAVKKLLKIEKEAEILSVLSHRNIIQF |
| | | | | YGVILEPPNYGIVTEYASLGSLYDYINSNRSEEMDMDHIMTWA |
| | | | | TDVAKGMHYLHMEAPVKVIHRDLKSRNVVIAADGVLKICDFGA |
| | | | | SRFHNHTTHMSLVGTFPWMAPEVIQSLPVSETCDTYSYGVVLW |
| | | | | EMLTREVPPKGLEGLQVAWLVVEKNERLTIPSSCPRSFAELLH |
| | | | | QCWEADAKRRPSFKQIISILESMSNDTSLPDKCNSFLHNKAEW |
| | | | | RCEIEATLERLKKLERDLSFKEQELKERERRLKMWEQKLTEQS |
| | | | | NTPLLLPLAARMSEESYFESKTEESNSAEMSCQITATSNGEGH |
| | | | | GMNPSLQAMMLMGFGDIFSMNKAGAVMHSGMQINMQAKQNSSK |
| | | | | TTSKRRGKKVNMALGFSDFDLSEGDDDDDDDGEEEYNDMDNSE |
| 99 | 838 | 185 | 328 | MIWETGCSAACRVTVSPTVTFATFSTRGIDAMRPGPSFLWRQQ |
| | | | | LSQG* |
| 100 | 839 | 1 | 348 | PTLGDQPDLHSITRASRPKLCTRKNcNPLTITVHDPNSTQ*YY |
| | | | | GMSWELRFYIPGFDVGTMFTIQKILVSWSPPKPIGPLTDLGDP |
| | | | | MFQKPPNKVDLTVPPPFLVIKDTLQKFEKI |
| 101 | 840 | 1 | 416 | SLNNVTLPQAKTEKDFIQLCTPGVIKQEKLGTVYCQASSPGAN |
| | | | | MIGNKMSAISVHGVSTSGGQMYHYDMNTASLSQQ*DQKPIFNV |
| | | | | IPPIPVGSENWNRCQGSGDDNITSLGTLNFPGRTVSFSFEMES |
| | | | | RSVAQAGVQ |
| 102 | 841 | 105 | 354 | RHTQECRCPHTHIHTHTHSHTHSHTHSHSHSHTTPRCSHTQPP |
| | | | | HAQAPALC*S*EDRGQPTWKLCAHRPRLKVIKEGGWLGG |
| 103 | 842 | 171 | 347 | NYSLSVYLVRQLTAGTLLQKLRAKGIRNPDHSRALSE*HLSSL |
| | | | | PHLIWIQVFLALQPS |
| 104 | 843 | 2 | 690 | ATYIVDFGFSTTFREGQMLTAPCGMYPYVAPERSLGQACQ*PA |
| | | | | RDIQSLSVILYFRNTVGRRARTLPFYS/AFASKLQEKILTGRY |
| | | | | HAPPLLALQLDSL/IKLLMLNARKCPSL*LMKNPWVKSSQKMP |
| | | | | LIPYEEPL/RGPPQTIQLMVAMGFQAKNISVAIIERKFNYPMA |
| | | | | TYLILEHTKQERKCSTIRELSLPPGVPTSPSPSTELSTFPLSL |
| | | | | MRAHREPAFNVQPPEESQ |
| 105 | 844 | 2 | 777 | AKQELAKLMRIEDPSLLNSRVLLHHAKAGTIIARQGDQDVSLH |
| | | | | FVLWGCLHVYQRMIDKAEDVCLFVAQPGELVGQLAVLTGEPLI |
| | | | | FTLRAQRDCTFLRISKSDFYEIMRAQPSVVLSAAHTVAARMSP |
| | | | | FVRQMDFAIDWTAVEAGRALYRCSSHRAAQARPRGGDLGVVRP |
| | | | | C*PPRPLRQGDRSDCTYIVLNGRLRSVIQRGSGKKELVGEYGR |
| | | | | GDLIGVVSATPTH*PLAFSRPVPRQLTRIIPGNPGSGEVFPGA |
| 106 | 845 | 3 | 709 | HASGWTPGTTQTLGQGTAWDTVASTPGTSETTASAEGRRTPGA |
| | | | | TRPAAPGTGSWAEGSVKAPAPIPESPPSKSRSMSNTTEGVWEG |
| | | | | TRSSVTNRARASKDRREMTTTKADRPREDIEGVRIALDAAKKV |
| | | | | LGTIGPPALVSETLAWEILPQATPVSKQQSQGSIGETTPAAGM |
| | | | | WTLGTPAADVWILGTPAADVWTSMEAASGEGSAAGDLDAATGD |
| | | | | RGPQATLSQTPAV*PWGPPG |
| 107 | 846 | 3 | 406 | AGTSGTGDTGPGNTAVSGTPVVSPGATPGAPGSSTPGEADIGN |
| | | | | TSFGKSGTPTVSAASTTSSPVSKHTDAASATAVTISGSKPGTP |
| | | | | GTPGGATSGGKITPGIA*PTLDQKSPCFSGYGGYFPVNPHQNP |
| | | | | CADSL |
| 108 | 847 | 1 | 565 | RAHRCCLPLPSLSCEIQIGFS*SSIFPGQ*ACPCSCCRSCRRN |
| | | | | WPQSPRCPHHPPAPCSLLLSSCLPPPLSCSWRGTSGKPPSQSP |
| | | | | AASRSMRPRCSPRTSSLRGASCRGPGGSAPAAASGPRCRGCSR |
| | | | | SPRRCSRSGCAAASPPRSQRRSPPLSPPPFPTSGTLLLKTSRF |
| | | | | GSATRE*SSPRPRPRP |
| 109 | 848 | 2 | 987 | DDVPPPAPDLYDVPPGLRRPGPGTLYDVPRERVLPPEVADGGV |
| | | | | VDSGVYAVPPPAEREAPAEGKRLSASSTGSTRSSQSASSLEVA |
| | | | | GPGREPLELEVAVEALARLQQGVSATVAHLLDLAGSAGATGSW |
| | | | | RSPSEPQEPLVQDLQAAVAAVQSAVHELLEFARSAVGNAAHTS |
| | | | | DRALHAKLSRQLQKMEDVHQTLVAHGQALDAGRGGSGATLEDL |
| | | | | DRLVACSRAVPEDAKQLASFLHGNASLLFRRTKATAPGPEGGG |
| | | | | TLHPNPTDKTSSIQSRPLPSPPKFTSQDSPDGQYENSEGGWME |
| | | | | DYDYVHLTGGRRSF*KTQKELLGKRAA |
| 110 | 849 | 84 | 372 | MATDEENVYGLEENAQSRQESTRRLILVGRTGAGKSATGNSIL |
| | | | | GQRRFFSRLGATSVTRACTTGSRRWDKCHVEVVDTPDIFSSQV |
| | | | | SKTDPGCEERX* |
| 111 | 850 | 2 | 47 | TLGLRSLTKEGGGGGDVAAFEVGTGAAASRALGQCGQLQKLIV |
| | | | | IFIGSLCGLCTKCAVSNDLTQQEIQTPEIQQRNA*CDSRVTFT |
| | | | | NEGGRWWG |
| 112 | 851 | 1192 | 1040 | FFFLVETRFEHIGQAGLELLTLSIK*SARLGLPKCWDDRREPP |
| | | | | YLAGFMI |
| 113 | 852 | 791 | 362 | RRSPPPAPPPLPSPLSPPPRAPVSPASTMPILLFLIDTSASMN |
| | | | | QRSHLGTTYLDTAKGAVETFMKLRARDPASRGDRYMLVTFEEP |
| | | | | PYAIKAGWKENHATFMNELKNLQAEGLTTLGQSLRTAFDLLNL |
| | | | | NRLVTGIDNYGQVG |
| 114 | 853 | 812 | 348 | NCRTYVFCFVLVFRLLFLHGSPLSPSLLSRAGLLCGSAENPTP |
| | | | | FLCGITMAAGVSLLALVVRVILSTAILCPSGASRRQRSSEVEW |
| | | | | GTDSGVYRLYCWRVGFLGPGGELRLGLSEARGGRVWGRGEKRC |
| | | | | RVWAVRSLRKGFGSVAALRRGIWAG |
| 115 | 854 | 93 | 170 | VTPTPPQYYTCSCVLGFIACSIFLQMSLKPKVMLLTVALVACL |
| | | | | VLFNLSQCWQRDCCSQGLGNLTEPSGTNR*GPAAVSWASLPAP |
| | | | | SSCR |
| 116 | 855 | 1 | 183 | GKAGGAAGLFAKQVQKKFSRAQEK*TRRFGKTCQPEERAREER |
| | | | | QEGPEIEFGFSFFSLSLY |
| 117 | 856 | 53 | 2400 | PKRLFLFQDVNTLQGGGQPVVTPSVQPSLQPAHPALPQMTSQA |
| | | | | PQPSVTGLQAPSAALMQVSSLDSHSAVSGNAQSFQPYAGMQAY |
| | | | | AYPQASAVTSQLQPVRPLYPAPLSQPPHFQGSGDMASFLMTEA |
| | | | | RQHNTEIRMAVSKVADKMDHLMTKVEELQKHSAGNSMLIPSMS |
| | | | | VTMETSMIMSNIQRIIQENERLKQEILEKSNRIEEQNDKISEL |
| | | | | IERNQRYVEQSNLMMEKRNNSLQTATENTQARVLHAEQEKAKV |
| | | | | TEELAAATAQVSHLQLKMTAHQKKETELQMQLTESLKETDLLR |
| | | | | GQLTKVQAKLSELQETSEQAQSKFKSEKQNRKQLELKVTSLEE |
| | | | | ELTDLRVEKESLEKNLSERKKKSAQERSQAEEEIDEIRKSYQE |
| | | | | ELDKLRQLLKKTRVSTDQAAAEQLSLVQAELQTQWEAKCEHLL |
| | | | | ASAKDEHLQQYQEVCAQRDAYQQKLVQLQEKSVCFA\CLALQA |
| | | | | QITALTKQNEQHIKELEKNKSQMSGVEAAASDPSEKVKKIMNQ |
| | | | | VFQSLRREFELEESYNGRTILGTIMNTIRMVTLQLLNQQEQEK |
| | | | | EESSSEEEEEKAEERPRRPSQEQSASASSGQPQAPLNRERPES |
| | | | | PMVPSEQVVEEAVPLPPQALTTSQDGHRRKGDSEAEALSEIKD |
| | | | | GSLPPELSCIPSHRVLGPPTSIPPEPLGPVSMDSECEESLAAS |
| | | | | PMAAK\PDNPSGK\VCVQGK*APDGPTYKE\SSTRLFPGFQDP |
| | | | | E\EGDPLALGLE\SPG\EPQPPQLQGKVDVH*VPPVPHKGAFQ |
| | | | | EQEGRFPQFCRE |
| 118 | 857 | 1 | 791 | SETAQQIIDRLRVKLAKEPGANLFLMAVQDIRVGGRQSNASYQ |
| | | | | YTLLSDDLAALREWEPKIRKKLATLPELADVNSDQQDNGAEMN |
| | | | | LVYDRDTMARLGIDVQAANSLLNNAFGQRQISTIYQPMNQYKV |
| | | | | VMEVDPRYTQDISALEKMFVINNEGKAIPLSYFAKWQPANAPL |
| | | | | SVNHQGLSAALTISFNLPTGKSLSDASAAIDRAMSQLGVPSTV |
| | | | | RGSFAGPAQVFQETMNSQVILIIAAIATVYIVLOIPYERYVHP |
| | | | | PTILL*RPGANLFLMAVQDIRVGGRQSNASYQYTLLSDDLAAL |
| | | | | REWEPKIRKKLATLPELADVNSDQQDNGAEMNTVYDRDTMARL |
| | | | | GIDVQAANSLLNNAFGQRQISTIYQPMNQYKVVMEVDPRYTQD |
| | | | | ISALEKMFVINNEGKAIPLSYFAKWQPANAPLSVNHQGLSAAL |
| | | | | TISFNLPTGKSLSDASAAIDRAMSQLGVPSTVRGSFAGPAQVF |
| | | | | QETMNSQVILIIAAIATVYIVLGIPYERYVHPPTILL |
| 119 | 858 | 3 | 417 | IITPDAMGCQKDIAEKIQKQGGDYLFAVKGNQGRLNKAFEEKF |
| | | | | PLKELNNPEHDSYAISEKSHGREEIRLHIVCDVPDELIDFTFE |
| | | | | WKGLKKLCVAVSFRSIIAEQKKEPEMTVRYNIS*LGIAGDISV |
| | | | | TAISGTDD |
| 120 | 859 | 2 | 373 | HYLKMLTQARREVIIANAYFFPGYRFLHAIRKAARRGVRIKLI |
| | | | | IQGEPDMPIVRVGARLLYNYLVKGGVQVFEYRRRPLHGKVALM |
| | | | | DDHWATVGSSNLHPVS*SGNLQANILHVLRVPTLNP |
| 121 | 860 | 286 | 495 | CWSKSAAFHSKLATTCIVPVCAAGHCSAAW*SLRPIEALAKEV |
| | | | | RELK*HTR*LLNPATTRELTSLGRNLNRLLKSERERYDKYRTT |
| | | | | LTDLTHSLKTPLAVLQSTLRSLRSEKMSVSDAEPVMLEQISRI |
| | | | | SQQIGYYLHRASMRGGTLLSRELHPVAPLLDNLTSALIKGKPR |
| | | | | KGGNVTVFPFTAMYRDGH |
| 122 | 861 | 2 | 725 | GNTVMFQHLMQKRKHTQWTYGPLTSTLYDLTEIDSSGDEQSLL |
| | | | | ELIITTKKREARQILDQTPVKELVSLKWKRYGRPYFCMLGAIY |
| | | | | LLYIICFTMCCIYRPLKPRTNNRTSPRDNTLLQQKLLQEAYMT |
| | | | | PKDDIRLVGELVTVIGAIIILLVEVPDIFRMGVTRFFGQTILG |
| | | | | GPFHVLIITYAFMVLVTMVMRLISASGEVVPMSFALVLGWCNV |
| | | | | MYFARGFQMLGPFTIMIQKMIFGDLM |
| 123 | 862 | 1 | 135 | EKAAAANIDEVQKSDVSSTGQGVIDKDALGPMMLEVAHLHFSA |
| | | | | VF |
| 124 | 863 | 2 | 364 | LEVPSEVTPLGFAMQATKTLLLRTCCLQEFNIMEKNKGWALLG |
| | | | | GKDGHLQGLFLLANALLERNQLLAQKVMYLLVPLLNRGNDKHK |
| | | | | LTSAGFFVELLRSPVAKRLPSIYSVARFKDWLQD |
| 125 | 864 | 1 | 374 | RPAPAPSAAPEEAPSP\GVKGRGMAKRRVPAPVWGGAGGGTKS |
| | | | | ARRAAAAKPDTERSEEGGRAVKEAYPSSRQPPPSP*PLRCARR |
| | | | | CHPNLAPSMPISNREGKGKRREEKIRPLSPASTHTSARA |
| 126 | 865 | 3 | 364 | LQGVHGSSSTFCSSLSSDFDPLEYCSPKGDPQRVDMQPSVTSR |
| | | | | PRSLDSEVPTGETQVSSHVHYHRHRHHHYKKRFQRHGRKPGPE |
| | | | | TGVPQSRPPIPRTQPQPEPPSPDQQVTRSNSAAP |
| 127 | 866 | 2 | 250 | MADPDPRYPRSSIEDDFNYGSSEASDTVHIRMAFLRRVYSILS |
| | | | | LQDLLATVTSTDNLAFEDGRTDWLQRPDCVSFKIHVLPM |
| 128 | 867 | 194 | 375 | AGMSVVVVPPIGSSYLGLISQEHFPNEFTSGDGKKAHQDFGYF |
| | | | | YGSSYVAASDSSRTPGL |
| 129 | 868 | 104 | 339 | VAAALTLFPQQLSPPGAWGLGLSACFCCAEGFSRLNQQVLSSS |
| | | | | LLLLSRTNCPCKYSFLDNLKKLTPRRDVPTYPKVR |
| 130 | 869 | 2 | 360 | RDDACLYSPASAPEVITVGATNAQDQPVTLGTLGTNFGRCVDL |
| | | | | FAPGEDIIGASSDCSTCFVSQSGTSQAAAHVAGIAANMISAEP |
| | | | | ELTLAELRQRLIHFSAKDVINEAWFPEDQRVLT |
| 131 | 870 | 2 | 105 | LEIKFLEQVDQFYDDNFPMEIRHLLAQWIENQDW |
| 132 | 871 | 2 | 466 | EAGDADEDEADANSSDCEPEGPVEAEEPPQEDSSSQSDSVEDR |
| | | | | SEDEEDEHSEEEETSGSSASEESESEESEDAQSQSQADEEEED |
| | | | | DDFGVEYLLARDEEQSEADAGSGPPTPGPTTLGPKKEITDIAA |
| | | | | AAESLQPKGYTLATTQVKTPIPLLL |
| 133 | 872 | 1 | 354 | LKNLRELLLEDNQLPQIPSGLPESLTELSLIQTNIYNITKEGI |
| | | | | SRLINLKNLYLAWNCYFNKVCEKTNIEDGVFETLTNLELLSLS |
| | | | | FNSLSHVPPKLPSSLRKLFLSNTQIKYISEED |
| 134 | 873 | 59 | 184 | MRSQALGQSAPSLTASLKELSLPRRGSFPVCPNAGRTSPLG* |
| 135 | 874 | 1 | 210 | LLCVCLPVGACPSLSLLTAPLNQLMRCLRKYQSRTPSPLLHSV |
| | | | | PSEIVFDFEPGPVFRGSWALLSWSTRP |
| 136 | 875 | 131 | 254 | QTPDKKQNDQRNRKRKAEPYETSQGSNNFVSTKVLNSNVLR |
| 137 | 876 | 84 | 504 | YFIIKGMVELVPASDTLRKIQVEYGVTGSFKDKPLAEWLRKYN |
| | | | | PSEEEYEKASENFIYSCAGCCVATYVLGICDRHNDNIMLRSTG |
| | | | | HMFHIDFGKFLGHAQMFGSFKRDRAPFVLTSDMAYVINGGEKP |
| | | | | TIRFQLFVDL |
| 138 | 877 | 3 | 215 | PSPLPSLSLPPPVAPGGQESPSPHTAEVESEASPPPARPLPGE |
| | | | | ARLAPISEEGKPQLVGRF\QVTSSK\NRLSLFPCSQHPPLSLV |
| | | | | LQNLQPLSSLQRAQIQRTV/PGGGPETREALAESDRAAEGLGA |
| | | | | GVEEEGDDGKEPQVGGSPQPLSHPSPVWMNYSYSSLCLSSEES |
| | | | | ESSGEDEEFWAELQSLRQKRLSEVETLQTLQKKEIEDLYSRLG |
| | | | | KQPPPGIVAPAAMLSSRQRRLSKGSFPTSRRNSLQRSEPPGPG |
| | | | | ETA/GHPASIFSLRPLSVDCFSPGPGGLPRGNRPPLPTSPFLT |
| | | | | *CSPSP&TAEVESEASPPPARPLPGEARLAPISEEGKPQLVGR |
| | | | | FPSDFIQGTG |
| 139 | 878 | 1 | 337 | RRFVSQETGNLYIAKVEKSDVGNYTCVVTNTVTNHKVLGPPTP |
| | | | | LILRNDGVMGEYEPKIEVQFPETVPTAKGATVKLECFALGNPV |
| | | | | PTIIWRRADGKKPIARKARRHKSRVGK |
| 140 | 879 | 72 | 917 | MLRTCYVLCSQAGPRSRGWQSLSFDGGAFHLKGTGELTRALLV |
| | | | | LRLCAWPPLVTHGLLLQAWSRRLLGSRLSGAFLRASVYGQFVA |
| | | | | GETAEEVKGCVQQLRTLSLRPLLAVPTEEEPDSAAKSGEAWYE |
| | | | | GNLGAMLRCVDLSRGLLEPPSLAEASLMQLKVTALTSTRLCKE |
| | | | | LASWVRRPGASLELSPERLAEAMDSGQNLQVSCLNAEQNQHLR |
| | | | | ASLSRLHRVAQYARAQHVRLLVDAEYTSLNPALSLLVAALAVR |
| | | | | WNSPGEGGPNVNNTYQACLKDTF* |
| 141 | 880 | 219 | 308 | PHHRIAGDTAIDKNIHQSVSEQIKKNFAK |
| 142 | 881 | 182 | 317 | QMTNPFFLCFTTMISNCNFFKGPPGPPGEKGDRGPTGESGPRG |
| | | | | FP |
| 143 | 882 | 177 | 341 | NGIIASFFLRTFIFCFIHIQGCQAGQTIKVQVSFDLLSLMFTF |
| | | | | VSPCTNDLIIH |
| 144 | 883 | 3 | 1441 | KLSVNHRRTHLTKLMHTVEQATLRISQSFQKTTEFDTNSTDIA |
| | | | | LKVFFFDSYNMKHIHPHMNMDGDYINIFPKRKAAYDSNGNVAV |
| | | | | AFLYYKSIGPLLSSSDNFLLKPQNYDNSEEEERVISSVISVSM |
| | | | | SSNPPTLYELEKITFTLSHRKVTDRYRSLCAFWNYSPDTMNGS |
| | | | | WSSEGCELTYSNETHTSCRCISLTHFAILMSSGPSIGIKDYNI |
| | | | | LTRITQLGIIISLICLAICIFTFWFFSEIQSTRTTIHKNLCCS |
| | | | | LFLAELVFLVGINTNTNKLFCSIIAGLLHYFFLAAFAWMCIEG |
| | | | | IHLYLIVVGVIYNKGFLHKNFYIFGYLSPAVVVGFSAALGYRY |
| | | | | YGTTKVCWLSTENNFIWSFIGPACLIILVNLLAFGVIIYKVFR |
| | | | | HTAGLKPEVSCFENIRSCARGALALLFLLGTTWIFGVLHVVHA |
| | | | | SVVTAYLPTVSNAPQGMFIFLFLCVLSRKIQEEYYRLFKNVPC |
| | | | | CFGCLR |
| 145 | 884 | 1 | 429 | GTREAAPSRFMFLLFLLTCELAAEVAAEVEKSSDGPGAAQEPT |
| | | | | WLTDVPAAMEFIAATEVAVIGFFQDLEIPAVPILHSMVQKFPG |
| | | | | VSFGISTDSEVLTHYNITGNTICLFRLVDNEQINTEDEDIESI |
| | | | | DATKLSRFIEINSL |
| 146 | 885 | 1 | 156 | DETSGLIVREVSIELSRQQVEELFGPEDYWCQCVAWSSAGTTK |
| | | | | SRKAYVRIA |
| 147 | 886 | 1 | 121 | GTRSIHVKLDVGKLHTQPKLAAQLRMVDDGSGKVEGLPGI |
| 148 | 887 | 128 | 652 | XCGEDGSFTQVQCHTYTGYCWCVTPDGKPISGSSVQNKTPVCS |
| | | | | GSVTDKPLSQGNSGRKDDGSKPTPTMETQPVFDGDEITAPTLW |
| | | | | IKHLVIKDSKLNNTNIRNSEKVYSCDQERQSALEEAQQNPREG |
| | | | | IVIPECAPGGLYKPVQCHQSTGYCWCVLVDTGRPLPGTSTRYV |
| | | | | MPSX* |
| 149 | 888 | 128 | 273 | VLQLIKSQKFLNKLVILVETEKEKILRKEYVFADSKVSDSKLL |
| | | | | KWAVR |
| 150 | 889 | 1 | 948 | RRLSLLDLQLGPLGRDPPQECSTFSPTDSGEEPGQLSPGVQFQ |
| | | | | RRQNQRRFSMEDVSKILSLPMDIRLPQEFLQKLQMESPDLPKP |
| | | | | LSRMSRRASLSDIGFGKLETYVKLDKLGEGTYATVFKGRSKLT |
| | | | | ENLVALKEIRLEHEEGAPCTAIREVSLLKNLKHANIVTLHDLI |
| | | | | HTDRSLTLVFEYLDSDLKQYLDHCGNLMSMHNVKVRPRGQGPP |
| | | | | ILAATCPEAQCGDPLSPPGIRLLRWLKPSHVGKRERAMPSTSP |
| | | | | GTGLSALPQEQTHTVCHCLAVGIKPTLNSEHQFPSLSNGSVSY |
| | | | | LPKCREASGEARGYE |
| 151 | 890 | 3 | 108 | HERHEPSPTALAFGDHPIVQPKQLSFKIIQVNDN |
| 152 | 891 | 2 | 208 | ARGPSLLSEFHPGSDRPQERRTSYEPIHPGPSPVDHDSLESKR |
| | | | | PRLEQASDSHYQGHITGESLPGRVH |
| 153 | 892 | 1 | 116 | GTRKEEFSAEENFLILTEMATNHVQVLVEFTKKLPGIF |
| 154 | 893 | 74 | 661 | HTHKLVAPRPGLPPTSQWPRDAGRQASGGLPSLSTGPPKGPRD |
| | | | | GLARGHPAWELAGSPGNNSPTQGSLPPQLDLYAGALFVHICLG |
| | | | | WNFYLSTILTLGITALYTIAGMVPAAGRSTQGTCKGVRRPPPP |
| | | | | TGPREQPRKWPQQEPQKFLPVSLLPGARAPSSNLASTGRGPGC |
| | | | | CNLHGRPADAHHGGGGCHPDNQR |
| 155 | 894 | 55 | 312 | MVNHSLQETSEQNVILQHTLQQQQQMIQQETIRNGELEDTQTK |
| | | | | LEKQVSKLEQELQKQRESSAEKLRKMEEKCESAAHEADLKRQK |
| | | | | * |
| 156 | 895 | 38 | 185 | VCPKWCRFLTMLGHCCYFWHVWPAS*AISAGPTPTSRSFSPSP |
| | | | | LRSIST |
| 157 | 896 | 37 | 462 | MRGPPVLLLQAAPMECPVPQGIPAGSSPEPAPDPPGPHFLRQE |
| | | | | RSFECRMCGKAFKRSSTLSTHLLIHSDTRPYPCQFCGKRFHQK |
| | | | | SDMKKHTYIHTGEKPHKCQTQREPTMVLSPADKTNVKAAWX* |
| 158 | 897 | 3 | 175 | HEQLTNNTATAPSATPVFGQVAASTAPSLFGQQTGITASTAVA |
| | | | | TPQVISSRFINTLDF |
| 159 | 898 | 187 | 677 | VSVFKNCPMY*ICIFLTKMFCVLLII\*NKF*VHKKPLQEVEIA |
| | | | | AITHGALQGLAYLHSHTMIHRDIKAGNILLTEPGQVKLADFGS |
| | | | | ASMASPANSFVGTPYWMAPEVILANDEGQYDGKVDVWSLGITC |
| | | | | IELAERKPPLFNMNAMSALYHIAQNESPTLQSNEW |
| 160 | 899 | 2 | 1060 | RHARPGGGGHSNQRKMSLEQEEETQPGRLLGRRDAVPAFIEPN |
| | | | | VRFWITERQSFIRRFLQWTELLDPTNVFISVESIENSRQLLCT |
| | | | | NEDVSSPASQDQRIQEAWKRSLATVHPDSSNLIPKLFRPAAFL |
| | | | | PFMAPTVFLSMTPLKGIKSVILPQVFLCAYMAAFNSINGNRSY |
| | | | | TCKPLERSLLMAGAVASSTFLGVIPQFVQMKYGLTGPWIKRLL |
| | | | | PVIFLVQASGMNVYMSRSLESIKGIAVMDKEGNVLGHSRIAGT |
| | | | | KAVRETLASRIVLFGTSALIPEVFTYFFKRTQYFRKNPGSLWI |
| | | | | LKLSCTVLAMGLMVPFSFSIFPQIGQIQYCSLEEKIQSPTEET |
| | | | | EIFYHRGV |
| 161 | 900 | 3 | 564 | HASGRLEVFYNGTWGSVGRRNITTAIAGIVCRQLGCGENGVVS |
| | | | | LAPLSKTGSGFMWVDDIQCPKTHISIWQCLSAPWERRISSPAE |
| | | | | ETWITCEDRIRVRGGDTECSGRVEIWHAGSWGTVCDDSWDLAE |
| | | | | AEVVCQQLGCGSALAALRDASFGQGTGTIWLDDMRCKGNESFL |
| | | | | WDCHAKPWGQSDCG |
| 162 | 901 | 1099 | 2 | LGDFPQPQRQRRPGASDLPPHLAGARQWEVRFFRHLPARTLPP |
| | | | | SLRMPEGPELHLASQFVNEACRALVFGGCVEKSSVSRNPEVPF |
| | | | | ESSAYRISASARGKELRLILSPLPGAQPQQEPLALVFRFGMSG |
| | | | | SFQLVPREELPRHAHLRFYTAPPGPRLALCFVDIRRFGRWDLG |
| | | | | GKWQPGRGPCVLQEYQQFRENVLRNLADKAFDRPICEALLDQR |
| | | | | FFNGIGNYLRAEILYRLKIPPFEKARSVLEALQQHRPSPELTL |
| | | | | SQKIRTKLQNPDLLELCHSVPKEVVQLGGRGYGSESGEEDFAA |
| | | | | FRAWLRCYGMPGMSSLQDRHGRTIWFQGDPGPLAPKGRKSRKK |
| | | | | KSKATQLSPEDRVEDALPPSK |
| 163 | 902 | 3 | 335 | LTWSACYWRDILRIQLWIAADILLRMLEKALLYSEHQNISNTG |
| | | | | LSSQGLLIFAELIPAIKRTLARLLVIIASLDYGIEKPHLGTGM |
| | | | | HRVIGLMLLYLIFANAESVIRVIG |
| 164 | 903 | 2 | 135 | FFFEMESRSAAQAGVQWCNLGSLQALPPRFTPFSCLSLPSSWD |
| | | | | Y |
| 165 | 904 | 74 | 645 | YECEELAKKLENSQRDGISRNKLALAELYEDEVKCKSSKSNRP |
| | | | | KATVFKSPRTPPQRFYSSEHEYSGLNIVRPSTGKIVNELFKEA |
| | | | | REHGAVPLNEATRASGDDKSKSFTGGGYRLGSSFCKRSEYIYG |
| | | | | ENQLQDVQILLKLWSNGFSLDDGELRPYNEPTNAQFLESVKRG |
| | | | | VTLIACMPEIQQLMLEIF |
| 166 | 905 | 14 | 1257 | WPCGAAPGLTHASERMFTLTTMIQALAPVMGWDRKPLKMFSSE |
| | | | | EMRGHLHHHHKCLTKILKVEGQVPDLPSCLPLTDNTRMLASIL |
| | | | | INMLYDDLRCDPERDHFRKICEEYITGKFDPQDMDKNLNAIQT |
| | | | | VSGILQGPFDLGNQLLGLKGVMEMMVALCGSERETDQLVAVEA |
| | | | | LIHASTKLSRATFIITNGVSLLKQIYKTTKNEKIKIRTLVGLC |
| | | | | KLGSAGGTDYGLRQFAEGSTEKLAKQCRKWLCNMSIDTRTRRW |
| | | | | AVEGLAYLTLDADVKDDFVQDVPALQAMFELAKTSDKTILYSV |
| | | | | ATTLVNCTNSYDVKEVIPELVQLAKFSKQHVPEEHPKDKKDFI |
| | | | | DMRVKRLLKAGVISALACMVKADSAILTDQTKELLARVFLALC |
| | | | | DNPKDRGTIVAQGGGKALIPLALEGTD |
| 167 | 906 | 3 | 894 | VDSVGGGSESRSLDSPTSSPGAGTRQLVKASSTGTESSDDFEE |
| | | | | RDPDLGDGLENGLGSPFGKWTLSSAAQTHQLRRLRGPAKCREC |
| | | | | EAFMVSGTECEECFLTCHKRCLETLLILCGHRRLPARTPLFGY |
| | | | | DFLQLPRDFPEEVPFVVTKCTAEIEHRALDVQGIYRVSGSRVR |
| | | | | VERLCQAFENGRALVELSGNSPHDVSSVLKRFLQELTEPVIPF |
| | | | | HLYDAFISLAKTLHADPGDDPGTPSPSPEVIRSLKTLLVQLPD |
| | | | | SNYNTLRHLVAHLFRVAARFMENKMSANNLGIVFGPTL |
| 168 | 907 | 1 | 394 | GLHVISLHSADGRHWEDPLSELDSERVSAFLVTETLVFYLFCL |
| | | | | LADETVVPPDVPSYLSSQGTLSDRQETVVRTEGGPQANGHIES |
| | | | | NGKASVTVKQSSAVTVSLGAGGGLQVFTGQVPGIRWGKLGEAH |
| | | | | AS |
| 169 | 908 | 179 | 551 | KIKHRPEEEPRWAAAGAQSAGPGAAEVAPPRPGTVAPGANGMT |
| | | | | DSATANGDDRDPEIELFVKAGIDGESIGNCPFSQRLFMILWLK |
| | | | | GVVFNVTTVDLKRKPADLRNLAPGTHPPFLAFNWYVKT |
| 170 | 909 | 1 | 335 | LGFSDGQEARPEEIGWLNGYNETTGERGDFPGTYVEYIGRKKI |
| | | | | SPPTPKPRPPRPLPVAPGSSKTEADVEQQVLYKYRKKPSSSHR |
| | | | | PQTPHNGKSKNFLHKQGLKKKKASL |
| 171 | 910 | 1 | 895 | RTRGVMELALRRSPVPRWLLLLPLLLGLNAGAVIDWPTEEGKE |
| | | | | VWDYVTVRKDAYMFWWLYYATNSCKNFSELPLVMWLQGGPGGS |
| | | | | STGFGNFEEIGPLDSDLKPRKTTWLQAASLLFVDNPVGTGFSY |
| | | | | VNGSGAYAKDLAMVASDMMGLLKTFFSCHKEFQTVPFYIFSES |
| | | | | YGGKMAAGIGLELYKAIQRGTIKCNFAGVALGDSWISPVDSVL |
| | | | | SWGPYLYSMSLLEDKGLAEVSKVAEQVLNAVNKGLYREATELW |
| | | | | GKAEMIIEQVKRGNTQRRACLAFSGGYRAHGWCCQTWSLH |
| 172 | 911 | 553 | 194 | PGWSRSPDLVIRLPRPPKVLGLQYYHFFFFLRWSL/DSVAQAE |
| | | | | VQWHDLRSLQAPPPGFTPFSCLSLPGSWDYRCPPPRPANFLYF |
| | | | | **RRGFTVLARMVSIS*PRDPPASASQSAGITVLSLFFFFEME |
| | | | | SCSVAGAGVQWRYLGSLQALPPGFTPFSCLSLPSSWDYRRPPP |
| | | | | RPANFFVFLVETGVSPC*PGWSRSPDLVIRLPQPPKVLGLQV |
| 173 | 912 | 1761 | 1 | PSMKTGELEKETAPLRKDADSSISVLEIHSQKAQIEEPDPPEM |
| | | | | ETSLDSSEMAKDLSSKTALSSTESCTMKGEEKSPKTKKDKRPP |
| | | | | ILECLEKLEKSKKTFLDKDAQRLSPIPEEVPKSTLESEKPGSP |
| | | | | EAAETSPPSNIIDHCEKLASEKEVVECQSTSTVGGQSVKKVDL |
| | | | | ETLKEDSEFTKVEMDNLDNAQTSGIEEPSETKGSMQKSKFKYK |
| | | | | LVPEEETTASENTEITSERQKEGIKLTIRISSRKKKPDSPPKV |
| | | | | LEPENKQEKTEKEEEKTNVGRTLRRSPRISRPTAKVAEIRDQK |
| | | | | ADKKRGEGEDEVEEESTALQKTDKKEILKKSEKDTNSKVSKVK |
| | | | | PKGKVRWTGSRTRGRWKYSSNDESEGSGSEKSSAASEEEEEKE |
| | | | | SEEAILADDDEPCKKCGLPNHPELILLCDSCDSGYHTALPFAP |
| | | | | PLMIHPQMGGW\F\CPTFCPTLNLLLLEKLEDQF\QDL\DVAL |
| | | | | KKERALPERRK\ERLVYVGI\SIENIIPPQ\EPDFSEDQEEKK |
| | | | | KDSKKSKANLL\ERRSTRTRKCISYRFDEFDEAIDEAIEDDIK |
| | | | | EADGGGVGRGKDISTITGHRGKDISTILDEER |
| 174 | 913 | 3 | 539 | KRRGSFKMAELDQLPDESSSAKALVSLKEGSLSNTWNEKYSSL |
| | | | | QKTPVWKGRNTSSAVEMPFRNSKRSRLFSDEDDRQINTRSPKR |
| | | | | NQRVAMVPQKFTATMSTPDKKASQKIGFRLRNLLKLPKAHKWC |
| | | | | IYEWFYSNIDKPLFEGDNDFCVCLKESFPNLKTRKLTRVEWGK |
| | | | | IRRLMG |
| 175 | 914 | 166 | 635 | MPEYLRKRFGGIRIPIILAVLYLFIYIFTKISVDMYAGAIFIQ |
| | | | | QSLHLDLYLAIVGLLAITAVYTVAGGLAAVIYTDALQTLIMLI |
| | | | | GALTLMGYSFAAVGGMEGLKEKYFLALASNRSENSSCGLPRED |
| | | | | AFHIFRDPLTSDLPWPGVLFGMSIPSLX* |
| 176 | 915 | 673 | 1025 | XSASATSLTLSHCVDVVKGLLDFKKRRGHSIGGAPEQRYQIIP |
| | | | | VMCCSLLATGGADRLIHLWNVVGSRLEANQTLEGAGGSITSVD |
| | | | | FDPSGYQVLAATYNQVAQFWK* |
| 177 | 916 | 3 | 139 | QKRFPSNCGRDGKLFLWGQALHIIAKLLGKWRRLGMVFFSLLL |
| | | | | SY |
| 178 | 917 | 1 | 541 | VHVCSSKMGALSTERLQYYTQELGVRERSGHSVSLIDLWGLLV |
| | | | | EYLLYQEENPAKLSDQQEAVRQGQNPYPIYTSVNVRTNLSGED |
| | | | | FAEWCEFTPYEVGFPKYGAYVPTELFGSELFMGRLLQLQPEPR |
| | | | | ICYLQGMWGSAFATSLDEIFLKTAGSGLSFLEWYRGSVNITDD |
| | | | | CQKPQLHN |
| 179 | 918 | 1 | 628 | EFLGRPTRPAKDEGNDEGKDEGKDEGKDEGKDEGKDEGKDERK |
| | | | | DEGKDEGKDERKDEGKDEGKDEGKDEGKDEGKDEGKDEGKDEG |
| | | | | NDEGKDEGKDEGKDEGKDEGKDEGKDERKDEGKDEGKDERKDE |
| | | | | GKDEGKDEGKDEGKDEGKDEGKDEGKDEGNDEGKDEGKDEGKD |
| | | | | EGKDEGKDEGKDEGNDEGNDEGNDEGKDEGKDERNDEGKDEGK |
| | | | | DEGKDEGKDERNDEGKDERKDEGKDEGKDEGKDEGKDEGKDEG |
| | | | | NDEGKDERKDEGKDEGKDEGKDK |
| 180 | 919 | 27 | 471 | PSLRPAWHEGEDFSYGLQPYCGYSFQVVGEMIRNREVLPCPDD |
| | | | | CPAWAYALMIEGWNEFPSRRARFKDIHSRLRAWGNLSNYNSSE |
| | | | | QTSGGRNTTQTSSLSTSPLCNVSNAPYVGPKQKVPPFPQTQVI |
| | | | | PMKGQIRPMVPPPQLYVP |
| 181 | 920 | 2 | 454 | RNSGRHPRVRWILEERKRVMQEACAKYRASSSRRAVTPRHVSR |
| | | | | IFVEDRHRVLYCEVPKAGCSNWKRVLMVLAGLASSTADIQHNT |
| | | | | VHYGSALKRLDTFDRQGILHRLSTYTKMLFVREPFERLVSAFR |
| | | | | DKFEHPNSYYHPVFCMAILAR |
| 182 | 921 | 2 | 378 | IMYSISPANSEEGQELYVCTVKDDVNLDTVLLLPFLKEIAVSQ |
| | | | | LDQLSPEEQLLVKCAAIIGHSFHIDLLQHLLPGWDKNKLLQVL |
| | | | | RALVDIHVLCWSDICSQELPAEPILMPSSIDIIDGTKEKK |
| 183 | 922 | 181 | 513 | GPHVVLVLRRCFLLSYFKGVEKAKAMPSPRILKTHLSTQLLPP |
| | | | | SFWENNCKVRYQQLPVTEGKVSQPKRVLQTPTQSIRDHLCLST |
| | | | | VSDAYQQRENIKFYIQQDIHLNSFK |
| 184 | 923 | 32 | 239 | FYYICRLSKEDKAFLWEKRYYCFKHPNCLPKILASAPNWKWVN |
| | | | | LAKTYSLIMQWPALYPLIALELLDSK |
| 185 | 924 | 3 | 361 | KMMI*GLFEIQQCPIGKHCNFLQVLRN/PNRDL/WLVSSFGKS |
| | | | | SKGRERMGHHDEYYRLRGR/HNPSPDHSYKRNGESERKRKKSH |
| | | | | *HMSKSQERHNSPSRGRNSDRSGGRCSRSDNGRSRYR |
| 186 | 925 | 443 | 1412 | PLSLFARVAGSRVEMPEPPGLGDEGRPLLHPGRREAVGSWVSA |
| | | | | FAGDSTPCGPGDLSVPRREPFRLTAL*PHRSPVVRTSLIGLLL |
| | | | | GPSVKEELRGVGWAARTPLGIR |
| 187 | 926 | 2 | 917 | FDKRQHEARIQQMENEIKYIQENLKSMEEIQGLTDLQLQEADE |
| | | | | EKERILAQLRELEKKKKLEDAKSQEQVFGLDKELKKLKKAVAT |
| | | | | SDKLATAELTIAKDQLKSLHGTVMKINQEPAEELQEAERFSRK |
| | | | | AAQAARDLTRAEAEIELLQNLLRQKGEQFRLEMEKTGVGTGAN |
| | | | | SQVLEIEKLNETMERQRTEIARLQNVLYLTGSDNKGGFENVLE |
| | | | | EIAELRREGSYQNDYISSMADPFKRRGYWYFMPPPPSSKVSSH |
| | | | | SSQATKDSGVGLKYSASTPVRKPRPGQQDGKEGSQPPPASGYW |
| | | | | VYSP |
| 188 | 927 | 171 | 1082 | SDASSFKTRVIVVPRPRVFPLGSAITENSLESDSQIGQFGVGF |
| | | | | YSAFLVADKVIVTSKHNNDTQHIWESDSNEFSVIADPRGNTLG |
| | | | | RGTTITLVLKEEASDYLELDTIKNLVKKYSQFINFPIYVWSSK |
| | | | | TETVEEPMEEEEAAMEEKEESDDEAAVEEEEEEKKPKTKKVEK |
| | | | | TVWDWELMNDIKPIWQRPSKEVEEDEYKAFYKSFSKESDDPMA |
| | | | | YIHFTAEGEVTFKSILFVPTSAPRGLFDEYGSKKSDYIKLYVR |
| | | | | RVFITDDFHDMMPKYLNFVVKGWDSDDLPLNVSRETLQQHKLL |
| | | | | KV |
| 189 | 928 | 718 | 275 | CGSWMRRALIPPCRGGPSASDRCCSCSPSGPSAGRGRCPVQGC |
| | | | | LRPHRVQLLRRWGPGSPAGQRLSKGFQLLRWWGPGSPAPEPRK |
| | | | | GPFPPPDPPWPVTAVTVMAGSVPSAQSVDALESPGPLALEGPS |
| | | | | SPRNLLWREMSIFLPGIF |
| 190 | 929 | 1 | 550 | PGPTPPPRHGSPPHRLIRVETPGPPAPPADERISGPPASSDRL |
| | | | | AILEDYADPFDVQETGEGSAGASGAPEKVPENDGYMEPYEAQK |
| | | | | MMAEIRGSKETATQPLPLYDTPYEPEEDGATPEGEGAPWPRES |
| | | | | RLPEDDERPPEEYDQPWEWKKERISKAFAVDIKVIKDLPWPPP |
| | | | | VGQLDSSPSLP |
| 191 | 930 | 1 | 562 | QFFSLFLRYQIHTGLQHSIIRPTQPNCLPLDNATLPQKLKEVG |
| | | | | YSTHMVGKWHLGFYRKECMPTRRGFDTFFGSLLGSGDYYTHYK |
| | | | | CDSPGMCGYDLYENDNAAWDYDNGIYSTQMYTQRVQQILASHN |
| | | | | PTKPIFLYIAYQAVHSPLQAPGRYFEHYRSIININRRRYAAML |
| | | | | SCLDEAINNVTLALK |
| 192 | 931 | 3 | 580 | RVRKGRGGERLQSPLRVPQKPERPPLPPKPQFLNSGAYPQKPL |
| | | | | RNQGVVRTLSSSAQEDIIRWFKEEQLPLRAGYQKTSDTIAPWF |
| | | | | HGILTLKKANELLLSTGMPGSFLIRVSERIKGYALSYLSEDGC |
| | | | | KHFLIDASADAYSFLGVDQLQHATLADLVEYHKEEPITSLGKE |
| | | | | LLLYPCGQQDQLPDYLELFE |
| 193 | 932 | 3 | 1641 | GSLEKALFQLLKVWGQWAEQTRRLQRLDVSLSVARVRSAGPSC |
| | | | | QNKGDLVMEALLEGIQNRGHGGGFLTSCEAELQELMKQIDIMV |
| | | | | AHKKSEWEGRTHALETCLKIREQELKSLRSQLDVTHKEVGMLH |
| | | | | QQVEEHEKIKQEMTMEYKQELKKLHEELCILKRSYEKLQKKQM |
| | | | | REFRGNTKNHREDRSEIERLTAKIEEFRQKSLDWEKQRLIYQQ |
| | | | | QVSSLEAQRKALAEQSEIIQAQLVNRKQKLESVELSSQSEIQH |
| | | | | LSSKLERANDTICANELEIERLTNRVNDLVGTSMTVLQEQQQK |
| | | | | EEKLRESEKLLEALQEEKRELKAALQSQENLIHEARIQKEKLQ |
| | | | | EKVKATNTQHAVEAISLESVSATCKQLSQELMEKYEELKRMEA |
| | | | | HNNEYKAEIKKLKEQILQGEQSYSSALEGMKMEISHLTQELHQ |
| | | | | RDITIASTKGSSSDMEKRLRAEMQKAEDKAVEHKEILDQLESL |
| | | | | KLENRHLSEMVMKLELGLHECSLPVSPLGSIATRFLEEEELRS |
| | | | | HHILERLDAHIEELKRESEKTVRQFTALK |
| 194 | 933 | 159 | 1053 | TGFLGWSQGPSLTPTSLSALYPSQVEETGVVLSLEQTEQHSRR |
| | | | | PIQRGAPSQKDTPNPGDSLDTPGPRILAFLHPPSLSEAALAAD |
| | | | | PRRFCSPDLRRLLGPILDGASVAATPSTPLATRHPQSPLSADL |
| | | | | PDELPVGTENVHRLFTSGKDTEAVETDLDIAQDADALDLEMLA |
| | | | | PYISMDDDFQLNASEQLPRAYHRPLGAVPRPRARSFHGLSPPA |
| | | | | LEPSLLPRWGSDPRLSCSSPSRGDPSASSPMAGARKRTLAQSS |
| | | | | KDEDEGVELLGVRPPKRSPSPEHENFLLFPLSLSFLLTG |
| 195 | 934 | 3 | 425 | ELQDCFDVHDASWEEQIFWGWHNDVHIFDTKTQTWFQPEIKGG |
| | | | | VPPQPRAAHTCAVLGNKGYIFGGRVLQTRMNDLHYLNLDTWTW |
| | | | | SGRITINGESPKHRSWHTLTPIADDKLFLCGGLNAYNMPLSDG |
| | | | | WIHNVTTHCWK |
| 196 | 935 | 2 | 295 | FFFLRTRSHSVTPRWECSDDITAHWQPQPWGSSDPLTFS/RPQ |
| | | | | VVVPPRHTTLCP\ANFFVFCIFCRNRISPCWPGWSRTPWAQLI |
| | | | | RLPRPPKVLGLQV |
| 197 | 936 | 2 | 737 | PREGQVKQGLLGDCWFLCACAALQKSRHLLDQVIPPGQPSWAD |
| | | | | QEYRGSFTCRIWQFGRWVEVTTDDRLPCLAGRLCFSRCQREDY |
| | | | | FWLPLLEKVYAKVHGSYEHLWAGQVADALVDLTGGLAERWNLK |
| | | | | GVAGSGGQQDRPGRWEHRTCRQLLHLKDQCLISCCVLSPRAGE |
| | | | | ARGQHGRAAASVPPTARPQAHCSFLCDWLHSPVRTKWEEVSLF |
| | | | | SRVVSSVCDLPLLSSSRGTWPFSPLTSPFH |
| 198 | 937 | 3 | 638 | AECLEASIARYAHRVANSRYTFDGETVTLSPSQGVNQLHGGPE |
| | | | | GFDKRRWQIVNQNDRQVLFALSSDDGDQGFPGNLGATVQYRLT |
| | | | | DDNRISITYRATVDKPCPVNMTNHVYFNLDGEQSDVRNHKLQI |
| | | | | LADEYLPVDEGGIPHDGLKSVAGTSFDFRSAKIIASEFLADDD |
| | | | | QRKVKGYDHAFLLQAXGDGKKVAAHVWSADEKLQLKVYT |
| 199 | 938 | 69 | 425 | PLSRFLSKESQEDWGMERQSRVMSEKDEYQFQHQGAVELLVFN |
| | | | | FLLILTILTIWLFKNHRFRFLHETGGAMVYDKPPKFAMSREQM |
| | | | | SQSCSHTAHNASLLTDAGPLSCGESRASCLPL |
| 200 | 939 | 3 | 435 | DSKEPRLQQLGLLEEEQLRGLGFRQTRGYKSLAGCLGHGPLVL |
| | | | | QLLSFTLLAGLLVQVSKVPSSISQEQSRQDAIYQNLTQLKAAV |
| | | | | GELSEKSKLQEIYQELTQLKAAVGELPEKSKLQEIYQELTWLK |
| | | | | AAVGELPEKSKMQE |
| 201 | 940 | 657 | 469 | MQSIAWGHRRDRGESPLGWGQESEASPSALTEAPKAAHTTRLG |
| | | | | FLAANNIPNGHSQPQDSFLL* |
| 202 | 941 | 1 | 714 | FETLSMRGIPHMLALGPQQLLAQDEEGDTLLHLFAARGLRWAA |
| | | | | YAAAEVLQVYRRLDIREHKGKTPLLVAAAANQPLIVEDLLNLG |
| | | | | AEPNAADHQGRSVLHVAATYGLPGVLLAVLNSGVQVDLEARDF |
| | | | | EGLTPLHTAILALNVAMRPSDLCPRVLSTQARDRLDCVHMLLQ |
| | | | | MGANHTIQVSGDVGGQTLGDCVEWGHLDVRELQANADFASSLL |
| | | | | RALEHVTSLLCALRVFCLFLCQL |
| 203 | 942 | 3 | 479 | DAWADAWVGTKMADLDSPPKLSGVQQPSEGVGGGRCSEISAEL |
| | | | | IRSLTELQELEAVYERLCGEEKVVERELDALLEQQNTIESKMV |
| | | | | TLHRMGPNLQLIEGDAKQLAGMITFTCNLAENVSSKVRQLDLA |
| | | | | KNRLYQAIQRADDILDLKFCMDGVQTALR |
| 204 | 943 | 1 | 706 | AVEFRVPRSGSAYLYSYVTVGELWAFTTGWNLILSYVIGTASV |
| | | | | ARAWSSAFDNLIGNHISKTLQGSIALHVPHVLAEYPDFFALGL |
| | | | | VLLLTGLLALGASESALVTKVFTGVNLLVLGFVMISGFVKGDV |
| | | | | HNWKLTEEDYELAMAELNDTYSLGPLGSGGFVPFGFEGILRGA |
| | | | | ATCFYAFVGFDCIATTGEEAQNPQRSIPMGIGISLSVCFLADF |
| | | | | AVSSALTLMMPYYQLQPESP |
| 205 | 944 | 1 | 852 | GFHPNTTHYRARAAARAGAGSFVGEVSAVDKDFGPNGEVRYSF |
| | | | | EMVQPDFELHAISGEITNTHQFDRESLMRRRGTAVFSFTVIAT |
| | | | | DQGIPQPLKDQATVHVYMKDINDNAPKFLKDFYQATISESAAN |
| | | | | LTQVLRVSASDVDEGNNOLIHYSIIKGNEERQFAIDSTSGQVT |
| | | | | LIGKLDYEATPAYSLVIQAVDSGTIPLNSTCTLNIDILDENDN |
| | | | | TPFF/LLNQHFFVDVLENMRIGELGASGTATDS\DSGDIADLY |
| | | | | YKFTGTKHPPGTFSISPKHLGVFFLAQK |
| 206 | 945 | 3 | 363 | GDCYDLYGGEKFATLAELVQYYMEHHGQLKEKNGDVIELKNPL |
| | | | | NCADPTSQRWFHGHLSGKEAEKLLTEKGKHSSFLVRESQSHPG |
| | | | | DFVLSVCTGDDKGESNDGKSKVTHVMIHCQELK |
| 207 | 946 | 218 | 717 | IDSGNQNGGNDDKTKNAERNYLNVLPGEFYITRHSNLSEIHVA |
| | | | | FHLCVDDHVKSGNITARDPAIMGLRNILKVCCTHDITTISIPL |
| | | | | LLVHDMSEEMTIPWCLRRAELVFKCVKGFMMEMASWDGGISRT |
| | | | | VQFLVPQSISEEMFYQLSNMLPQIFRVSSTLTLTSKH |
| 208 | 947 | 3 | 368 | SILPALLVTILIFMDQQITAVIVNRKENKLKKAAGYHLDLFWV |
| | | | | GILMALCSFMGLPWYVAATVISIAHIDSLKMETETSAPGEQPQ |
| | | | | FLGVREQRVTGIIVFILTGISVFLAPILKCIPLPV |
| 209 | 948 | 2 | 575 | GASRVEAGSANGMLIDGGSQIVKVQGHADGTTINKSGSQDVVQ |
| | | | | GSLATNTTINGGRQYVEQSTVETTTIKNGGEQRVYESRALDTT |
| | | | | IEGGTQSLNSKSTAKNTHIYSGGTQIVDNTSTSDVIEVYSGGV |
| | | | | LDVRGGTATNVTQHDGAILKTNTNGTTVSGTNSEGAFSIHNHV |
| | | | | ADNVLLENGGHLDINAYGS |
| 210 | 949 | 1 | 296 | FFSSIQLTDDQGPVLMTTVAMPVFSKQNETRSKGILLGVVGTD |
| | | | | VPVKELLKTIPKYKVMNDLIPEIKATEMPRALFSQSSGFKLYF |
| | | | | GAMFLLTTITAC |
| 211 | 950 | 3 | 594 | SCSGTGTNACYMEDMSNIDLVEGDEGRMCINTEWGAFGDDGAL |
| | | | | EDIRTEFDRELDLGSLNPGKQLFEKMISGLYLGELVRLILLKM |
| | | | | AKAGLLFGGEKSSALHTKGKIETRHVAAMEKYKEGLANTREIL |
| | | | | VDLGLEPSEADCIAVQHVCTIVSFRSANLCAAALAAILTRLRE |
| | | | | NKKVERLRTTVGMDGTLYKIHPQY |
| 212 | 952 | 2 | 2167 | FVAIATNGVVPAGGSYYMISRSLGPEFGGAVGLCFYLGTTFAG |
| | | | | AMYILGTIEELLAYLFPAMAIFKAEDASGEAAAMLNNMRVYGT |
| | | | | CVLTCMATVVFVGVKYVNKFALVFLGCVILSILAIYAGVIKSA |
| | | | | FDPPNFPICLLGNRTLSRHGFDVCAKLAWEGNETVTTRLWGLF |
| | | | | CSSRFLNATCDEYFTRNNVTEIQGIPGAASGLIKENLWSSYLT |
| | | | | KGVIVERSGMTSVGLADGTPIDMDHPYVFSDMTSYFTLLVGIY |
| | | | | FPSVTGIMAGSNRSGDLRDAQKSIPTGTILAIATTSAVYISSV |
| | | | | VLFGACIEGVVLRDKFGEAVNGNLVVGTLAWPSPWVIVIGSFF |
| | | | | STCGAGLQSLTGAPRLLQAISRDGIVPFLQVFGHGKANGEPTW |
| | | | | ALLLTACICEIGILIASLDEVAPILSMFFLMCYMFVNLACAVQ |
| | | | | TLLRTPNWRPRFRYYHWTLSFLGMSLCLALMFICSWYYALVAM |
| | | | | LIAGLIYKYIEYRGAKKEWGDGIRGLSLSAARYALLRLEEGPP |
| | | | | HTKNWRPQLLVLVRVDQDQNVVHPQLLSLTSQLKAGKGLTIVG |
| | | | | SVLEGTFLENHPQAQRAEESIRRLMEAEKVKGFCQVVISSNLR |
| | | | | DGVSHLIQSGGLGGLQHNTVLVGWPRNWRQKEDHQTWRNFIEL |
| | | | | VRETTAGHLALLVTKNVSMFPGNPERFSEGSIDRWGIGHDGGM |
| | | | | LMLVPFLLRHHKVWRKCKMRIFTVAQMVDMHAM |
| 213 | 952 | 1 | 128 | FYLRLLSFFCFQEHEKRCWSVDFNLMDPKLLASGSDDAKGTV |
| 214 | 953 | 3 | 244 | RNSKAMHRSSCDGPLLSLPSVGRSATHALVQAQLICSGARRGM |
| | | | | HAFIVPIRSLQDHTPLPGKPIMLPQGTLPGGEPRWPP |
| 215 | 954 | 2 | 609 | CGTLILQARAYVGPHVLAVVTRTGFCTAKGGLVSSILHPRPIN |
| | | | | FKFYKHSMKFVAALSVLALLGTIYSIFILYRNRVPLNEIVIRA |
| | | | | LDLVTVVVPPALPAAMTVCTLYAQSRLRRQGIFCIHPLRINLG |
| | | | | GKLQLVCFDKTGTLTEDGLDVMGVVPLKGQAFLPLVPEPRRLP |
| | | | | VGPLLRALATCHALSRLQDTPVGDPMDLKM |
| 216 | 955 | 292 | 855 | QIEYFRSLLDEHHISYVIDEDVKSGRYMELEQRYMDLAENARF |
| | | | | EREQLLGVQQHLSNTLKMAEQDNKEAQEMIGALKERSHHMERI |
| | | | | IESEQKGKAALAATLEEYKATVASDQIEMNRLKAQLENEKQRV |
| | | | | AELYSIHNSGDKSDIQDLLESVRLDKEKAETLASSLQEDLAHT |
| | | | | RNDANRLQDAIAKGRG |
| 217 | 956 | 2 | 400 | ARYRFTLSARTQVGSGEAVTEESPAPPNEATPTAAPPTLPPTT |
| | | | | VGATGAVSSTDATAIAATTEATTVPIIPTVAPTTMATTTTVAT |
| | | | | TTTTTAAATTTTESPPTTTSGTKIHESAPDEQSIWNVTVLPNS |
| | | | | KWA |
| 218 | 957 | 1 | 662 | LKSTQDEINQARSKLSQLHESRQEAHRSLEQYDQVLDGAHGAS |
| | | | | LTDLANLSEGVSLAERGSFGAMDDPFKNKALLFSNNTQELHPD |
| | | | | PFQTEDPFKSDPFKGADPFKGDPFQNDPFAEQQTTSTDPFGGD |
| | | | | PFKESDPFRGSATDDFFKKQTKNDPFTSDPFTKNPSLPSKLDP |
| | | | | FESSDPFSSSSVSSKGSDPFGTLDPFGSGSFNSAEGFADFSTI |
| | | | | EGRRG |
| 219 | 958 | 1 | 752 | RTRGGSGNSSQPSLREGHDKPVFNGAGKPHSSTSSPSVPKTSA |
| | | | | SRTQKSAVEHKAKKSLSHPSHSRPGPMVTPHNKAKSPGVRQPG |
| | | | | SSSSSAPGQPSTGVARPTVSSGPVPRRQNGSSSSGPERSISGS |
| | | | | KKPTNDSNPSRRTVSGTCGPGQPASSSGGPGRPISGSVSSARP |
| | | | | LGSSRGPGRPVSSPHELRRPVSGLGPPGRSVSGPGRSISGSIP |
| | | | | AGRTVSNSVPGRPVSSLGPGQTVSSSGPTIKPKCT |
| 220 | 959 | 439 | 582 | RGKGITPRYHLCISDPHNLKICCRVNGEVVQSSNTNQMVFKTE |
| | | | | DLIAW |
| 221 | 960 | 230 | 420 | VVAVTRWLCENGVSYLRKCVCSACRHGTRCAGEVAAAANNSHC |
| | | | | TVGIAFNAKIGGMGNQLTWM |
| 222 | 961 | 311 | 490 | GAPPPFVPTLKSDDDTSNFDEPKKNSWVSSSPCQLSPSGFSGE |
| | | | | ELPFVGFSYSKALGIL |
| 223 | 962 | 2 | 422 | FVERLAHLHAACAPRRKVALLLEVCRDVYAGLARGENQDPLGA |
| | | | | DAFLPALTEELIWSPDIGDTQLDVEFLMELLDPDELRGEAGYY |
| | | | | LTTWFGALHHIAHYQPETDRAPRGLSSEARASLHQWHRRRTLH |
| | | | | RKDHPRAQQLD |
| 224 | 963 | 385 | 844 | FWMDPYNPLNFKAPFQTSGENEKGCRDSKTPSESIVAISECHT |
| | | | | LLSCKVQLLGSQESECPDSVQRDVLSGGRHTHVKRKKVTFLEE |
| | | | | VTEYYISGDEDRKGPWEEFARDGCRFQKRIQETEDAIGYCLTF |
| | | | | EHRERMFNRLQGTCFKGLNVLKQC |
| 225 | 964 | 3 | 166 | AASTAYSFFGTVENMAPKVVNRPGHTQSADWGSFGGLMGRFEF |
| | | | | GIFLKGKEIVK |
| 226 | 965 | 1 | 118 | GFVFLPGPMSVGLDFSLPGMEHVYGIPEHADNLRLKVTE |
| 227 | 966 | 1 | 390 | GSECQGTDLDTRNCTSDLCVHTASGPEDVALYVGLIAVAVCLV |
| | | | | LLLLVLILVYCRKKEGLDSDVADSSILTSGFQPVSIKPSKADN |
| | | | | PHLLTIQPDLSTTTTTYQGSLCPRQDGPSPKFQLTNGHLLSPL |
| | | | | G |
| 228 | 967 | 1 | 777 | LIYNEDMICWIESRESSNQLKCIQITKAGGLTDEWTINILQSF |
| | | | | HNVQQMAIDWLTRNLYFVDHVGDRIFVCNSNGSVCVTLIDLEL |
| | | | | HNPKAIAVDPIAGKLFFTDYGNVAKVERCDMDGMNRTRIIDSK |
| | | | | TEQPAALALDLVNKLVYNVDLYLDYVGVVDYQGKNRHAVIQGR |
| | | | | QVRHLYGITVFEDYLYATNSDSYNIVRISRFNGTDIHSLIKIE |
| | | | | NAWGIRIYQKRTQPTVRSHACEVDPYGMPGGCSHICLLSSSYT |
| | | | | K |
| 229 | 968 | 3 | 488 | SSGNPQPGDSSGGGAGGGLPSPGEQELSRRLQRLYPAVNQQET |
| | | | | PLPRSWSPKDKYNYIGLSQGNLRVHYKGHGKNHKDAASVRATH |
| | | | | PIPAACGIYYFEVKIVSKGRDGYMGIGLSAQGVNMNRLPGWDK |
| | | | | HSYGYHGDDGHSFCSSGTGQPYGPTFTTGDVI |
| 230 | 969 | 1 | 228 | FFFFKMGSRSVTQAGVQWCDVSSLQAPPPRFTLFCLSLPSSWD |
| | | | | YRCVPPCPANFFVFLVETGFHRVSQYGLDLLTS |
| 231 | 970 | 2 | 119 | QLSLARGKVFLCALSFVYFAKALAEGYLKSTITQIERRVDIPS |
| | | | | SLVGVIDGSFEIGNLLVITFVSYFGAKLBRPKIIGAGCVIMGV |
| | | | | GTLLIAMPQFFMEQYKYERYSPSSNSTLSISPCLLESSSQLPV |
| | | | | SVMEKSKSKISNECEVDTSSSMWIYVFLGNLLRGIGETPIQPL |
| | | | | GIAYLDDFASEDNAAFYIGCVQTVAIIGPIFGFLLGSLCAKLY |
| | | | | VDIGFVNL/DHF*VSAQLGTRKGVLVCLVFCLLCQSIGRRLSE |
| | | | | EHHHSDREKG |
| 232 | 971 | 221 | 1068 | QPAGRVEAFCKFHMWAEGMTSLMKAALDLTYPITSMFSGAGFN |
| | | | | SSIFSVFKDQQIEDLWIPYFAITTDITASAMRVHTDGSLWRYV |
| | | | | RASMSLSGYMPPLCDPKDGHLLMDGGYINNLPADVARSMGAKV |
| | | | | VIAIDVGSRDETDLTNYGDALSGWWLLWKRWNPLATKVKVLNM |
| | | | | AEIQTRLAYVCCVRQLEVVKSSDYCEYLRPPIDSYSTLDFGKF |
| | | | | NEICEVGYQHGRTVFDIWGRSGVLEKMLRDQQGPSKKPASAVL |
| | | | | TCPNASFTDLAEIVSRIEPAKPAM |
| 233 | 972 | 133 | 635 | LWVIMFVSYLILTLLHVQTAVLARPGGESIGCDDYLGSDKVVD |
| | | | | KCGVCGGDNTGCQVVSGVFKHALTSLGYHRVVEIPEGATKINI |
| | | | | TEMYKSNNYLALRSRSGRSIINGNWAIDRPGKYEGGGTMFTYK |
| | | | | RPNEISSTAGESFLAEGPTNEILDVYVSLDVSGLFFGF |
| 234 | 973 | 1 | 420 | ISGGTRSAGPLRRNYNFIAAVVEKVAPSVVHVQLWGRNQQWIE |
| | | | | VVLQNGARYEAVVKDIDLKLDLAVIKIESNAELPVLMLGRSSD |
| | | | | LRAGEFVVALGSPFSLQNTATAGIVSTKQRGGKELGMKDSDMD |
| | | | | YVQIDATINYG |
| 235 | 974 | 2 | 860 | PRVRELKEILDRKGHFSENETRWIIQSLASAIAYLHNNDIVHR |
| | | | | DLKLENIMVKSSLIDDNNEINLNIKVTDFGLAVKKQSRSEAML |
| | | | | QATCGTPIYMAPEVISAHDYSQQCDIWSIGVVMYMLLRGEPPF |
| | | | | LASSEEKLFELIRKGELHFENAVWNSISDCAKSVLKQLMKVDP |
| | | | | AHRITAKELLDNQWLTGNKLSSVRPTNVLEMMKEWKNNPESVE |
| | | | | ENTTEEKNKPSTEEKLKSYQPWGNVPETNYTSDEEEEKQVGRI |
| | | | | IAAFLPSVKYPHHTWNIFLQICLFVVSL |
| 236 | 975 | 1 | 467 | LSISVSDVSLSDEGQYTCSLFTMPVKTSKAYLTVLGVPEKPQI |
| | | | | SGFSSPVMEGDLMQLTCKTSGSKPAADIRWFKNDKEIKDVKYL |
| | | | | KEEDANRKTFTVSSTLDFRVDRSDDGVAVICRVDHESLNATPQ |
| | | | | VAMQVLEMHYTPSVKIIPSTPFPQEG |
| 237 | 976 | 3 | 417 | YNQKVDLFSLGIIFFEMSYHPMVTASERIFVLNQLRDPTSPKF |
| | | | | PEDFDDGEHAXQKSVISWLLNHDPAKRPTATELLKSELLPPPQ |
| | | | | MEESELHEVLHHTLTNVDGKAYRTIDGPRSFRQRISPAIA\YT |
| | | | | YD\SDILKGN |
| 238 | 977 | 2 | 740 | DQDYKYDSTSDDSNFLNPPRGWDHTAPGHRTFETKDQPEYDST |
| | | | | DGEGDWSLWSVCSVTCGNGNQKRTRSCGYACTATESRTCDRPN |
| | | | | CPGIEDTFRTAATEVSLLAGSEEFNATKLFEVDTDSCERWMSC |
| | | | | KSEFLKKYMHKVMNDLPSCPCSYPTEVAYSTADIFDRIKRKDF |
| | | | | RWKDASGPKEKLEIYKPTARYCIRSMLSLESTTLAAQHCCYGD |
| | | | | NMQLITRGKGAGTPNLISTEFSAELHYKVDV |
| 239 | 978 | 2 | 612 | ESEENGESANDSTVAXEGTNVPLVAAGPCDDEGIVTSTGAKEE |
| | | | | DEEGEDVVTSTGRGNEIGHASTCTGLGEESEGVLICESAEGDS |
| | | | | QIGTVVEHVEAEAGAAIMNANENNVDSMSGTEKGSKDTDICSS |
| | | | | AKGIVESSVTSAVSGKDEVTPVPGGCEGPMTSAASDQSDSQLE |
| | | | | KVEDTTISTGLVGGSYDVLVSGEVPECEVAH |
| 240 | 979 | 79 | 361 | VCIICLIFSYYSFDSALQSAKSSLGGNDELSATFLEMKGHFYM |
| | | | | YAGSLLLKMGQHGNNVQWRALSELAALCYLIAFQVSLPLGAID |
| | | | | ISRSLDVF |
| 241 | 980 | 2 | 681 | QHPSQEKPQVLTPSPRKQKLNRKYRSHHDQMICKCLSLSISYS |
| | | | | ATIGGLTTIIGTSTSLIFLEHFNNQYPASEVVNFGTWFLFSFP |
| | | | | ISLIMLVVSWFWMHWLFLGCNFKETCSLSKKKKTKREQLSEKR |
| | | | | IQEEYEKLGDISYPEMVTGFFFILMTVLWFTREPGFVPGWDSF |
| | | | | FEKKGYRTDATVSVFLGFLLFLIPAKKPCFGKKNDGENQEHSL |
| | | | | GTEPIITWKDF |
| 242 | 981 | 1 | 491 | LEREGDKGTPVLRGFSSVSGSWSRRMPPFLLLTCLFITGTSVS |
| | | | | PVAKDPCSAYISLNEPWPNTDHQLDESQGPPLCDNHVNGEWYH |
| | | | | FTGMAGDAMPTFCIPENHCGTHAPVWKNGSHPLEGDGIVQRQA |
| | | | | CASFNGNCCLWNTTVEVKACPGGYYVYRLTKPSV |
| 243 | 982 | 1 | 983 | CGRTMSDIRHSLLRRDALSAAKEVLYHLDIYFSSQLQSAPLPI |
| | | | | VDKGPVELLEEFVFQVPKERSAQPKRLNSLQELQLLEIMCNYF |
| | | | | QEQTKDSVRQIIFSSLFSPQGNKADDSRMSLLGKLVSMAVAVC |
| | | | | RIPVLECAASWLQRTPVVYCVRLAXALVDDYCCLVPGSIQTLK |
| | | | | QIFSASPRFCCQFITSVTALYDLSSDDLIPPMDLLEMIVTWIF |
| | | | | EDPRLILITFLNTPIAANLPIGFLELTPLVGLIRWCVKAPLAY |
| | | | | KRKKKPPLSNGHVSNKVTKDGPVGMDRDSHLLYSKLHLSVLQV |
| | | | | LMTLQLHLTEKNLYGPPGADPKRPEG |
| 244 | 983 | 32 | 362 | SACSTGPELPGRATRSLTRPANQKGCDGDRLYYDGCAMIAMNG |
| | | | | SVFAQGSQFSLDDVEVLTATLDLEDVRSYRAEISSRNLAVSAP |
| | | | | VDTCVGCSSKTWKVAPFVRAWWRP |
| 245 | 984 | 158 | 398 | APLSRLCFPQVLVNEGGGFDRASGSFVAPVRGVYSFRFHVVKV |
| | | | | YNRQTVQVTSALAPIPGSGGWGGGRRGAQLTSGWTLH |
| 246 | 985 | 2 | 707 | PHIIGAEDDDFGTEHEQINGQCSCFQSIELLKSRPAHLAVFLR |
| | | | | HVVSQFDPATLLCYLYSDLYKHTNSKETRRIFLEFHQFFLDRS |
| | | | | AHLKVSVPDEMSADLEKRRPELIPEDLHRHYIQTMQERVHPEV |
| | | | | QRHLEDFRQKRSMGLTLAESELTKLDAERDKDRLTLEKERTCA |
| | | | | EQIVAKIEEVLMTAQAVEEDKSSTMQYVILMYMKRLGVKVKEP |
| | | | | RNLEHKRGRIGFLPKIKQSM |
| 247 | 986 | 18 | 441 | SPGTGRGPGPTSFVCLPTPQCPFIDDFILALHRKIKNEPVVFP |
| | | | | EGPEISEELKDLILKMLDKNPETRIGVPDIKLHPWVTKNGEEP |
| | | | | LPSEEEHCSVVEVTEEEVKNSVRLIPSWTTVILVKSMLRKRSF |
| | | | | GNPFEPQARMA |
| 248 | 987 | 3 | 732 | HASGIKIDKTSDGPKLFLTEEDQKKLHDFEEQCVEMYFNEKDD |
| | | | | KFHSGSEERIRVTFERVEQMCIQIKEVGDRVNYIKRSLQSLDS |
| | | | | QIGHLQDLSALTVDTLKTLTAQKASEASKVHNEITRELSISKH |
| | | | | LAQNLIDDGPVRPSVWKKHGVVNTLSSSLPQGDLESNNPFHCN |
| | | | | ILMKDDKDPQCNIFGQDLPAVPQRKEFNFPEAGSSSGALFPSA |
| | | | | VSPPELRQRLHGVELLKIFNKKQKKRA |
| 249 | 988 | 3 | 468 | CCRWIDCFALYDQQEELVRHIEKVHIDQRKGEDFTCFWAGCPR |
| | | | | RYKPFNARYKLLIHMRVHSGEKPNKCTFEGCEKAFSRLENLKI |
| | | | | HLRSHTGEKPYLCQHPGCQKAFSNSSDRAKHQRTHLDTKPYAC |
| | | | | QIPGCTKRYTDPSSLRKHVKAHSSK |
| 250 | 989 | 356 | 553 | LPLLWTLSDFGGTMDQSGMEIPVTLIIKAPNQKYSDQTISCFL |
| | | | | NWTVGKKKTHLSNVYPSKPVSV |
| 251 | 990 | 1 | 895 | AGTRMCVVAAAEELVCGA\RGLWMRRTRRPRFVLMNKMDDLNL |
| | | | | HYRFLNWRRRIREIREVRAFRYQERFKHILVDGDTLSYHGNSG |
| | | | | EVGCYVASRPLTKDSNYFEVSIVDSGVRGTIAVGLVPQYYSLD |
| | | | | HQPGWLPDSVAYHADDGKLYNGRAKGRQFGSKCNSGDRIGCGI |
| | | | | EPVSFDVQTAQIFFTKNGKRVGSTIMPMSPDGLFPAVGMHSLG |
| | | | | EEVRLHLNAELGREDDSVMMVDSYEDEWGRLHDVRVCGTLLEY |
| | | | | LGKGKSIVDVGLAQARHPLSTRSHYFEVEIVDPGEKCYIA |
| 252 | 991 | 51 | 674 | QQAEEHLAAYSVSDSDSGKDPSMECCRRATPGTLLLFLAFLLL |
| | | | | SSRTARSEEDRDGLWDAWGPWSECSRTCGGGASYSLRRCLSSK |
| | | | | SCEGRNIRYRTCSNVDCPPEAGDFRAQQCSAHNDVKHHGQFYE |
| | | | | WLPVSNDPDNPCSLKCQAKGTTLVVELAPKVLDGTRCYTESLD |
| | | | | MCISGLCQVSADLFSFNLSRGFQCLCVNGLHSLTL |
| 253 | 992 | 2 | 554 | RLLRQELVVLCHLHHPSLISLLAAGIRPRMLVMELASKGSLDR |
| | | | | LLQQDKASLTRTLQHRIALHVADGLRYLHSAMIIYRDLKPHNV |
| | | | | LLFTLYPNAAIIAKIADYGIAQYCCRMGIKTSEGTPGFRAPEV |
| | | | | ARGNVIYNQQADVYSFGLLLYDILTTGGRIVEGLKFPNEFDEL |
| | | | | EIQGKLPDPVKE |
| 254 | 993 | 3 | 437 | KASNSTHEFRIGLPEGWESEKKAVIPLGIGPPLTLICLGVLGG |
| | | | | ILIYGRKGFQTAHFYLKDSPSPKVISTPPPPIFPISKEVGPIP |
| | | | | IKHFPKHVANLHASRGFTEKFETLKKFYQEGQSCTVDLGITAN |
| | | | | SSNHPDNRHRNRSLI |
| 255 | 994 | 3 | 445 | SFPDRTASLVLLSVPVGQAGMQQRGLAIVALAVCAALHASPAI |
| | | | | LPIASSCCTEVSHHISRRLLERVNMCRIQRADGDCDLAAVILH |
| | | | | VKRRRICVSPHNHTVKQWMKVQAAKKNGKGNVCHRKKHHGKRN |
| | | | | SNRAHQGKHETYGHKTPY |
| 256 | 995 | 2 | 737 | FEQPGNPGDPRVRTPPPWGPHFFALIPSSPKEVPATPSSRRDP |
| | | | | IAPTATLLSKKTPATLAPKEALIPPAMTVPSPKKTPAIPTPKE |
| | | | | APATPSSKEASSPPAVTPSTYKGAPSPKELLIPPAVTSPSPKE |
| | | | | APTPPAVTPPSPEKGPATPAPKGTPTSPPVTPSSLKDSPTSPA |
| | | | | SVTCKMGATVPQASKGLPAKKGPTALKEVLVAPAPESTPIITA |
| | | | | PTRKGPQTKKSSATSPPICPDPSAKNGSKG |
| 257 | 996 | 79 | 3 | FFLKIQGLGWARWLTPVIPVLWEAE |
| 258 | 997 | 307 | 475 | AGFGYGLPISRLYAKYFQGDLNLYSLSGYGTDAIIYLKVSLEF |
| | | | | NSKILFLKPLLLL |
| 259 | 998 | 26 | 622 | WMRAPMLQKQQAPRMDTPPPEERLEKQNEKLNNQEEETEFKEL |
| | | | | DGLREALANLRGLSEEERSEKAMLRSRIEEQSQLICILKRRSD |
| | | | | EALERCQILELLNAELEEKMMQEAEKLKAQGEYSRKLEERFMT |
| | | | | LAANHELMLRFKDEYKSENIKLREENEKLRLENNSLFSQALKD |
| | | | | EEAKVLQLTVRCEAKTGELETLKERC |
| 260 | 999 | 2 | 241 | DPGASHASVQVQVLKEQLFAGRMPSPFRSCALMGMCGSRSADN |
| | | | | LSCPSPLNVMEPVSFFPLKSLGKGMIQHFRHIVSLV |
| 261 | 1000 | 1 | 620 | VTTTTHSVGRGHELQLLNEELRNIELECQNIMQAHRLQKVTDQ |
| | | | | YGDIWTLHDGGFRNYNTSIDMQRGKLDDIMEHPEKSDKDSSSA |
| | | | | YNTAESCRSTPLTVDRSPDSSLPRVINLTNKKNLRSTMAATQS |
| | | | | SSGQSSKESTSTKAKTTEQGCSAESKEKVLEGSKLPDQEKAVS |
| | | | | EHIPYLSPYHSSSYRYANIPAHARHYQSYMQLIQ |
| 262 | 1001 | 3 | 420 | VWGCLATVSTHKKIQGLPFGNCLPVSDGPFNNSTGIPFFYMTA |
| | | | | KDPVVADLMKNPMASLMLPESEGEFCRKNIVDPEDPRCVQLTL |
| | | | | TGQMIAVSPEEVEFAKQAMFSRHPGMRKWPRQYEWFFMKMRIE |
| | | | | HIWLQKWYG |
| 263 | 1002 | 43 | 441 | QAANMAVARVDAALPPGEGSVVNWSGQGLQKLGPNLPCEADIH |
| | | | | TLILDKNQIIKLENLEKCKRLIQLSVANNRLVRMMGVAKLTLL |
| | | | | RVLNLPHNSIGCVEGLKELVHLEWLNLAGNNLIAMEQINSCTA |
| | | | | LQHL |
| 264 | 1003 | 3 | 834 | FRAAVGAVPEGAWKDTAQLHKSEEAKRVLRYYLFQGQRYIWIE |
| | | | | TQQAFYQVSLLDHGRSCDDVHRSRHGLSLQDQMERKAIYGPNV |
| | | | | ISIPVKSYPQLLVDEAFSLALWLADHYYWYALCIFLISSISIC |
| | | | | LSLYKTRKQSQTLRDMVKLSMRVCVCRPGGEEEWVDSSELVPG |
| | | | | DCLVLSQEGGLMPCDAALVAGECMVNDSSLTGESIPVLKTALP |
| | | | | EGLGPYCAETHRRHTLFCGTLILHARAYVGPHVLAVVTRTGMS |
| | | | | REAGLERDPGSAPLKRWS |
| 265 | 1004 | 2 | 670 | FVGGGLHLHLCLLLCFMLPEDAAMAVLTASNHVSNVTVNYNIT |
| | | | | VERMNRMQGLRVSTVPAVLSPNATLALTAGVLVDSAVEVAFLW |
| | | | | TFGDGEQALHQFQPPYNESFPVPDPSVAQVLVEHNVTHTYAAP |
| | | | | GEYVLTVLASNAFENRTQQVLIRSGRVPIVSLECVSCKAQAVY |
| | | | | EVSRSSYVYLEGRCLNCSSGSKRGRWAARTFSNKTLVLDETTT |
| | | | | STGSASM |
| 266 | 1005 | 2 | 1093 | PEFLGRLFRGKAATLHVHSDQKPLHDGALGSQQNLVRMKEALR |
| | | | | ASTMDVTVVLPSGLEKRSVLNGSHAMMDLLVELCLQNHLNPSH |
| | | | | HALEIRSSETQQPLSFKPNTLIGTLNVHTVFLKEKVPEEKVKP |
| | | | | GPPKVPEKSVRLVVNYLRTQKAVVRVSPEVPLQNILPVICAKC |
| | | | | EVSPEHVVLLRDNIAGEELELSKSLNELGIKELYAWDNRRETF |
| | | | | RKSSLGNDETDKEKKKFLGFFKVNKRSNSKGCLTTPNSPSMHS |
| | | | | RSLTLGPSLSLGSISGVSVKSEMKKRRAPPPPGSGPPVQDKAS |
| | | | | EKVSLGSQIDLQKKKRRAPAPPPPQPPPPSPLIPNRTEDKEEN |
| | | | | RKSTMVYCCASFPTQAKRF |
| 267 | 1006 | 686 | 400 | VQWHNLHSLQPLPAGFK*FLCFSLPSSWDYRCAPPLP/APFFF |
| | | | | YFLFLVELGFHHIG*AGLELTSTDLPASAS/ESAGITGMSHRA |
| | | | | RPMDFFLLKIL |
| 268 | 1007 | 1 | 453 | GRRFRPPSDEEREPWEPWTQLRLSGHLKPLHYNLMLTAFMENF |
| | | | | TFSGEVNVEIACRNATRYVVLHASRVAVEKVQLAEDRAFGAVP |
| | | | | VAGFFLYPQTQVLVVVLNRTLDAQRNYNLKIIYNALIENELLG |
| | | | | FFRSSYVKHGERRFLGVTQFSP |
| 269 | 1008 | 333 | 526 | KELDPFYNS*RKIKYLRIYLTKEVKDLYKENYKTLLKEITDDT |
| | | | | N/KKHIPSSWTGRINTVKMTIL |
| 270 | 1009 | 699 | 882 | VPHPLQAIHEQMNCKEYQEDLALRAQNDAAARRPSEMFKVRLA |
| | | | | QGRGLASLSSGIQSGVG |
| 271 | 1010 | 16 | 148 | RWNSLTCVVLTFLGHRLLKRFLVPKLRRFLKPQGHPRLLLWFK |
| | | | | R |
| 272 | 1011 | 1 | 659 | YGEFVTYQGVAVTRSRKEGIAHNYKNETEWRANIDTVMAWFTE |
| | | | | EDLDLVTLYFGEPDSTGHRYGPESPERREMVRQVDRTVGYLRE |
| | | | | SIARNHLTDRLNLIITSDHGMTTVDKRAGDLVEFHKFPNFTFR |
| | | | | DIEFELLDYGPNGMLLPKEGRLEKVYDALKDAHPKLHVYKKEA |
| | | | | FPEAFHYANNPRVTPLLMYSDLGYVIHGVSRLLEAPPPGAPSP |
| | | | | GSGS |
| 273 | 1012 | 146 | 413 | RIPLLRLRSSTYRSKGFDVTVKHSHGSWTGFGGEDLATIPKGL |
| | | | | NTYFLVNIATIFESKNFFLPGIKWNGILGLSYATLAKPSSSLE |
| | | | | TFF |
| 274 | 1013 | 3 | 251 | IKSYSGPNGRSCQIWQRLRWGSRELLLGWKLSHSFSTCPFQFP |
| | | | | DIVEFCEAMANAGKTVIVAALDGTFQRKVRRLIQVWSWD |
| 275 | 1014 | 326 | 651 | YCFCFDLLH*CIHRDVKPENILITKHSVIKLCDFGFARLLTGP |
| | | | | SDYYTDYVATRWYRSPELPVGDTQ\GPPV\DVW\AIGCVSAE |
| | | | | \LLSGKCLWWPGKS/DMLDQLYLIRK |
| 276 | 1015 | 224 | 435 | RGWALDWIGADLSLHLQEEVETEVAWEECGHVLLSLCYSSQQG |
| | | | | GLLVGVLRCAHLAPMDANGYSDPFVRL |
| 277 | 1016 | 2 | 429 | GGILAMEYAPGGTLAEFIQKRCNSLLEEETILHFFVQILLALH |
| | | | | HVHTHLILHRDLKTQNILLDKHRMVVKIGDFGISKILSSKSKA |
| | | | | YTVVGTPCYISPELCEGKPYNQKSDIWALGCVLYELASLKRAF |
| | | | | EAANLPALVLKIM |
| 278 | 1017 | 1 | 262 | VQCGGIHQVSGAVVVSGLLQGMMGLLGSPGHVFPHCGPLVLAP |
| | | | | SLVVAGLSAHREVAQFCFTHWGLALLYVSPERRGMVPSGGVWG |
| | | | | D |
| 279 | 1018 | 1 | 480 | PRMTGSTHASAPSYGGSCRNNLFYREETYTPKAETDEMNEVET |
| | | | | APIPEENHVWLQPRVMRPTKPKKTSAVNYMTQVVRCDTKMKDR |
| | | | | CIGSTCNRYQCPAGCLNHXAKIFGSLFYESFASICRAAIHYGI |
| | | | | LDDICGGLVDITRNGKVPFFVKSERHGVQSLR |
| 280 | 1019 | 271 | 792 | VPQNIICAFFCVPCRFASTIPFWGLTLHLQHLGNNVFLLQTLF |
| | | | | GAVTLLANCVAPWALNHMSRRLSQMLLMFLLATCLLAIIFVPQ |
| | | | | EMQTLRVVLATLGVGAASLGITCSTAQENELIPSIIRGRATGI |
| | | | | TGNFANIGGALASLVMILSIYSRPLPWIIYGVFAILSGLVVLL |
| | | | | LP |
| 281 | 1020 | 2 | 679 | VLVSRDHMKSAQQFFQLVGGSASECDTIPGRQCMASCFFLLKQ |
| | | | | FDDVLIYLNSFKSHFYNDDIFNFNYAQAKAATGNTSEGEEAFL |
| | | | | LIQSEKMKNDYIYLSWLARGYIMNKKPRLAWELYLKMETSGES |
| | | | | FSLLQLIANDCYKMGQFYYSAKAFDVLERLDPNPEYWEGKRGA |
| | | | | CVGIFQMIIAGREPKETLREVLHLLRSTGNTQVEYMIRIMKKW |
| | | | | AKENRVSILK |
| 282 | 1021 | 3 | 359 | LKVSDELVQQYQIKNQCLSAIASDAEQEPKIDPYAFVEGDEEF |
| | | | | LFPDKKDRQNSEREAGKKHKVREITVHQRVTVDFVALHIVTLL |
| | | | | LPQLSHFFCLRIERVIIYLEKPIFARLRWLMP |
| 283 | 1022 | 3 | 538 | GVPRNLPSSLEYLLLSYNRIVKLAPEDLANLTALRVLDVGGNC |
| | | | | RRCDHAPNPCMECPRHFPQLHPDTFSHLSRLEGLVLKDSSLSW |
| | | | | LNASWFRGLGNLRVLDLSENFLYKCITKTKAFQGLTQLRKLNL |
| | | | | SFNYQKRVSFAHLVSGPPFLRGSLGRPLKGAGTWRGNLSFPLH |
| | | | | FEWGKT |
| 284 | 1023 | 3 | 442 | ILFAALIWSSFDENIEASAGGGGGSSIDAVMVDSGAVVBQYKR |
| | | | | MQSQESSAKRSDEQRKMKEQQAAEELREKQAAEQERLKQLEKE |
| | | | | RLAAQEQKKQAEEAAKQAELKQKQAEEAAAKAAADAKAKAEAD |
| | | | | AKAAEEAAKKAAADAKK |
| 285 | 1024 | 1 | 119 | AMEIVHEPRDLERYIVIREAVKVSNDSPVLLDRFLNDAIEC |
| 286 | 1025 | 67 | 227 | MLSPGYDYGYVCVEPSLLEDAIGCMEANQVALYFGQMMLEGYI |
| | | | | FLYMGREGFK |
| 287 | 1026 | 2 | 1101 | PRVRSSGGQEDPASQQWARPRFTQPSKMRRRVIARPVGSSVRK |
| | | | | KCVASGHPRPDITWMKDDQALTRPEAAEPRKKKWTLSLKNLRP |
| | | | | EDSGKYTCRVSNRAGAINATYKVDVIQRTRSKPVLTGTHPVNT |
| | | | | TVDFGGTTSFQCKVRSDVKPVIQWLKRVEYGAEGRHNSTIDVG |
| | | | | GQKFVVLPTGDVWSRPDGSYLNKLLITRARQDDAGMYICLGAN |
| | | | | TMGYSFRSAFLTVLPDPKPPGPPVASSSSATSLPWPVVIGIPA |
| | | | | GAVFILGTLLLWLCQAQKKPCTPAPAPPLPGHRPPGTARDRSG |
| | | | | DKDLPSLAALSAGPGVGLCEEHGSPAAPQHLLGPGPVAGPKLY |
| | | | | PKLYT\DIPHHTHTHTPHPPAN |
| 288 | 1027 | 3 | 96 | NFHFTGKCLFMSGLSEVQLTHMDDHTLPGY |
| 289 | 1028 | 95 | 407 | SPRKRKTRHSTNPPLECHVGWVMDSRDHGPGTSSVSTSNASPS |
| | | | | EGAPLAGSYGCTPHSFPKFQHPSHELLKENGFTQQVYHKYRRR |
| | | | | CLSERKRLGIGQSQEMNT |
| 290 | 1029 | 1 | 359 | PGSGGSAGGRDGSAYQGALLPREQFAAPLGRPVGTSYSATYPA |
| | | | | YVSPDVAQSWTAGPFDGSVLHGLPGRRPTFVSDFLEEFPGEGR |
| | | | | ECVNCGALSTPLWRRDGTGHYLCNACGLYHKMN |
| 291 | 1030 | 2 | 513 | PDHRHGALWWWYSCGVLPVTVSRNEGDERNQVLTLYLWIRQEW |
| | | | | TDAYLRWDPNAYGGLDAIRIPSSLVWRPDIVLYNKYCLS/AAP |
| | | | | PLSYPSLDLPLAVGV**SPLPTT*PGCHAAKEAFPQDPSKLPS |
| | | | | TQPLHGTPTLGYPRPAQAERLLGTYCVVQGRCLNHKGLSRAHP |
| 292 | 1031 | 1 | 595 | YALTGALVIVTGMVMGNIADYFNLPVSSMSNTFTFLNAGILIS |
| | | | | IFLNAWLMEIVPLKTQLRFGFLLMVLAVAGLMFSHSLALFSAA |
| | | | | MFILGVVSGITMSIGTFLVTQMYEGRQRGSRLLFTDSFFSMAG |
| | | | | MIFPMIAAFLLARSIEWYWVYACIGLVYVAIFILTFGCEFPAL |
| | | | | CSHATKLGTASSYPSLDVVQLRTLNA |
| 293 | 1032 | 71 | 479 | MAKVGLKTEHYDRYPHMFSGGQRQRIAIARGLMLDPDVVIADE |
| | | | | PVSALDVSVRAQVLNLMMDLQQELGLSYVFISHDLSVVEHIAD |
| | | | | EVMVMYLGRCVEKGTKDQIFNNPRHPYTQALLSATPRLNPDDR |
| | | | | RERIKLSX* |
| 294 | 1033 | 2 | 427 | SATLERVLNHPDETQARRLMTLEDIVSGYSNVLISLADSQGKT |
| | | | | VYHSPGAPDIREFTRDAIPDKDAQGGEVYLLSGPTMMMPGHGH |
| | | | | GHMEHSNWRMINLPVGPLVDGKPIYTLYIALSIDFHLHYINDL |
| | | | | MNKLIMTASVII |
| 295 | 1034 | 3 | 342 | VLAYPGIKVSTAEARAILPAQYRRQDCIAHGRHLAGFIHACYS |
| | | | | RQPELAAKLMKDVIAEPYRERLLPGFRQARQAVAEIGAVASGI |
| | | | | SGSGPTLFALCDKPETAQRVADWLGK |
| 296 | 1035 | 2 | 279 | GQQQRVALARALILKPKVLLFDEPLSNLDANLRRSMRDKIREL |
| | | | | QKQFDITSLYVTHDQSEAFAVSDTVLVMNKGHIMQIGSPQDLR |
| | | | | VRRLNW |
| 297 | 1036 | 3 | 157 | AVHYLERVRIAEHAHKFPGQISGGQQQRVAIARSLCMKPKIML |
| | | | | FDEPTSAL |
| 298 | 1037 | 1 | 217 | APYDAENYFDYDNLNNGPSLQHWFGVDSLGRDIFSRVLVGAQI |
| | | | | SLAAGVFAVFIGAAIGTLLGLLAGYYEGW |
| 299 | 1038 | 3 | 570 | VFCLIADLDPIDELVDFPIVYASALNGIAGLDHEDMAEDMTPL |
| | | | | YQAIVDHVPAPDVDLDGPFQMQISQLDYNSYVGVIGIGRIKRG |
| | | | | KVKPNQQVTIIDSEGKTRNAKVGKVLGHLGLERIETDLAEAGD |
| | | | | IVAITGLGELNISDTVCDTQNVEALPALSVDEPTVSMFFCVNT |
| | | | | SPFCGKEGKFVTSRQI |
| 300 | 1039 | 1 | 366 | QGTRAESQGSSKDKTRLAFAGLKFGDYGSIDYGRNYGVAYDIG |
| | | | | AWTDVLPEFGGDTWTQTDVFMTQRATGVATYRNNDFFGLVDGL |
| | | | | NFAAQYQGKNDRSDFDNYTEGNGHGFGFSATYEYEG |
| 301 | 1040 | 3 | 201 | DTYSVSIPLGATINMAGAAITITVLTLAAVNTLGIPVDLPTAL |
| | | | | LLSVVASLCACGASGVAGGSLL |
| 302 | 1041 | 1 | 140 | ANAQQGLPSGITLKLNNLVDKGLVDRLYAASSSGVPVNLLVRG |
| | | | | TCS |
| 303 | 1042 | 2 | 442 | ARMTLIPGTHLLENIHNIWVNGVGTNSAPFWRMLLNSFVMAFS |
| | | | | ITLGKITVSMLSAFAIVWFRFPLRNLFFWMIFITLMLPVEVRI |
| | | | | FPTVEVIANLQMLDSYAGLTLPLMASATATFLFRKLNMSGPDK |
| | | | | VVPAARISGYGPRVRKQ |
| 304 | 1043 | 2 | 403 | CAKCLRDADECPSGAFERIGRDISLDALEREVMKDDIFFRTSG |
| | | | | GGVTLSGGEVLMQAEFATRFLQRLRLWGVSCAIETAGDAPASK |
| | | | | LLPLAKLCDEVLFDLKIMDATQARDVVKMNLPRVLENLRLLVS |
| | | | | EGVN |
| 305 | 1044 | 1 | 346 | YLLLFVCFLVMSLLVGLVYKFTAERAGKQSLDDLMNSSLYLMR |
| | | | | SELREIPPHDWGKTLKEMDLNLSFDLRVEPLSKYHLDDISMHR |
| | | | | LRGGEIVALDDQYTFLQRIPRSHYVLAVG |
| 306 | 1045 | 1 | 207 | VELFLSDEGDDVVIEVADQGCGVPESLRDKIFEQGVSTRADEP |
| | | | | GEHGIGLYLIASYVTRCGGVITLEDN |
| 307 | 1046 | 3 | 213 | DAIIAPDANALPAAAQAAENLKNDKVAIVGFSTPNVMRPYVER |
| | | | | GTVKEFGLWDVVQQGKISVYVADALQ |
| 308 | 1047 | 1 | 129 | YIVVTGKTHCGTPLTTVTGDATQSGYLTLNLPEMWEVSGYNRV |
| 309 | 1048 | 271 | 46 | XEGVEPDINASKTRQQLNDVAGKMKIIEARLSALTNNQTKSLK |
| | | | | LNPVALPKVASQLLDELGYSLLARRADLQSAHX* |
| 310 | 1049 | 16 | 253 | ENIAEEYATKRYRSNVINWGMLPLQMAEVPTFEVGDYIYIPGI |
| | | | | KAALDNPGTTFKGYVIHEDAPVTEITLYMESQEART |
| 311 | 1050 | 2 | 299 | LQTEIGSMVYAVKPGDGSAREQAASCQRVIGGLANIAEEYATK |
| | | | | RYRSNVINWGMLPLQMAEVPTFEVGDYIYILGFKAAKYSPGTA |
| | | | | FTVYAISGYGPRI |
| 312 | 1051 | 1 | 344 | TLEDLLMALDGEQHLQQQVSEKVLADNVLIAPGSVKPDATFWS |
| | | | | ALIQDRYNVMTCIEKDACVLVEQDLNSDGQAERILFAFNDDRV |
| | | | | IVYGFDSDRKEWDALDMSLLPNEITKEK |
| 313 | 1052 | 2 | 630 | ENSSRCRKMPGERCRGGPARLSLLLDLPTRPLPHPRQVIDFGS |
| | | | | ASIFSEVRYVKEPYIQSRFYRAPEILLGLPFCEKVDVWSLGCV |
| | | | | MDELHLGWPLYPGNNEYDQVRYICETQGLPKPHLLHAACKAHH |
| | | | | FFKRNPHPDAANPWQLKSSADYLAETKVRPLERRKYMLKSLDQ |
| | | | | IETVNGGSVASRLTFPDREALAEHADLKSMVEL/MKRLL |
| 314 | 1053 | 1 | 302 | RLVKKRVECRQCGKAGRNQSTLKTHMRSHTGEKPYECDHCGKA |
| | | | | FSIGSNLNVHRRIHTGEKPYECLVCGEAFSDHSSLRSHVKTHR |
| | | | | GEKLFVSSVWKRKQ |
| 315 | 1054 | 1318 | 730 | CGPGFSLSFFFLRWSF\ALVAQAGVQWHDLGSLQPPAPGFKRF |
| | | | | SSLSLLSRWDYRHAHARLIFVFLVEMGFLHVGQAGLEIPTSGD |
| | | | | PPTSASQSARITGVTTPLGTFFFFLRWSFALVAQAGGQCLDLG |
| | | | | SLQLPPPGFKRLVCHFQTPQKHRCSCQAPGDCLQESFVMTGCV |
| | | | | LRTVSESVQRANAGAGAETVQGL |
| 316 | 1055 | 2486 | 1429 | MGNAAAAKKGSEQESVKEFLAKAKEDFLKKWESPAQNTAHLDQ |
| | | | | FERIKTLGTGSFGRVMLVKHKETGNHYAMKILD*QKVGKLKQI |
| | | | | EHTLNEKRILQAVNFPFLVKLEFSFKDNSNLYMVMEYVPGGEM |
| | | | | FSHLRRIGRFSEPHARFYAAQIVLTFEYLHSLDLIYRDLKPEN |
| | | | | LLIDQQGYIQVTDFGFAKRVKGRTWTLCGTPEYLAPEIILSKG |
| | | | | YNKAVDWWALGVLIYEMAAGYPPFFADQPIQIYEKIVSGKVRF |
| | | | | PSHFSSDLKDLLRNLLQVDLTKRFGNLKNGVNDIKNHKWFATT |
| | | | | DWIAIYQRKVEAPFIPKFKGPGDTS\NFDDYEEEEIRV\SINE |
| | | | | KFG\KEFSEF |
| 317 | 1056 | 867 | 461 | SSSRSSHGDSPPHSQTPCDTNRGLDTKH*/DSQSIEEKDSSQS |
| | | | | E*NRIERRKEVERILQTNSDYM*HWSN*PENILPKKFFSKHQK |
| | | | | CTATLSMRNTSIM/KKEGLF*AQFPSLLLSHLPAVGLGIYTGT |
| | | | | HLTTSTSTF |
| 318 | 1057 | 544 | 784 | TFHSSLEKNILQPCR*RRA\ICLPLLL*PSVPLLAPQYFSDLR |
| | | | | NSIVNSQPPEKQQAMHLCFENLMEGIERNLLTKNRDR |
| 319 | 1058 | 1606 | 228 | GTSGVQQEISRLTNENLDLKELVEKLEKNERKLKKQLKIYMKK |
| | | | | AQDLEAAQALAQSERKRHELNRQVTVQRKEKDFQGMLEYHKED |
| | | | | EALLIRNLVTDLKPQMLSGTVPCLPAYILYMCIRHA\DYTNDD |
| | | | | LKVHSLLTSTINGIKKVLKKHNDDFEMTSFWLSNTC\RLLHCL |
| | | | | KQYSGDEGFMTQNTAKQN\EHCLKNFDLTEYRQV\L\SDLSIQ |
| | | | | IYQQLIKIAEGVLQPMIVSAMLEN*SIQGLSGVKPTGSQKHSS |
| | | | | SMADEDNSYRLEAIIRQMNAFHTVMCDQGLDPEIILQVFKQLF |
| | | | | YMINAVTLNDLLLRKDVCSWSTGMQLRYNISQLEEWLRGRNLH |
| | | | | QSGAVQTMEPLIQAAQLLQLKKKTQEDAEAICSLCTSLSTQQT |
| | | | | VKILNLYTPLNEFEERVTVAFIRTIQAQLQERNDPQQLLLDAK |
| | | | | HMFPVLFPFNPSSLTMDSIHIPACLNLEFLNEV |
| 320 | 1059 | 3 | 250 | HEENTILKAAEVQVPPK*VVTPEAKAFI*RCLAYQKEDCIDAQ |
| | | | | QLACDP\YLLHYIQKLVFVSSPAGAAIASTFGVSNSCSSN |
| 321 | 1060 | 1332 | 500 | GTTDEIMTRWARVSTTYNKRPLPATSWEDMKKGSFEGTSQNLP |
| | | | | KRKQLEANRLSLKNDAPQAKHKKNKKKKEYLNEDVNGFMEYLR |
| | | | | QNSQMVHNGQIIATDSEEVREEIAVALKKDSRREGRRLKRQAA |
| | | | | KKNAMVCFHCRKPGHGIADCPAALENQDMGTGICYRCGSTEHE |
| | | | | ITKCKAKVDPALGEFPFAKCFVCGEMGHLSRSCPDNPKGLYAD |
| | | | | GGGCKLCGSVEHLKKDCPESQNSERMVTVGRWAKGMSADYEEI |
| | | | | LDVPKPQKPKTKIPKVVNF |
| 322 | 1061 | 384 | 102 | DHVRKSLLKNRAENIVNIFKCNVVSLPNLPAFGQAQWLTPVIP |
| | | | | ALWEAEVGGS*GQEIETILANAVK/SPFLLKIQKKKISRAWWR |
| | | | | AP/VSPRYSGG |
| 323 | 1062 | 1 | 777 | SDAWADAWARSLSVSPSSYPELHTEVPLSVLILGLLVVFILSV |
| | | | | CFGAGLFVFVLKRRKGVPSVPRNTNNLDVSSFQLQYGSYNTET |
| | | | | HDKTDGHVYNYIPPPVVQMCQNPIYMAGREGRPSSLLPKPGKE |
| | | | | FQLLGNLEEKKEEPATPAYTISATELLEKQATPREPELLYQNI |
| | | | | AE/PSQGTS/TAQA*STITFVPYLKGQFAPSYESRRQNQDRIN |
| | | | | KTVLYGTPRKCFVGQSKPNHPLLQAKPQSEPDYLEVLEKQTAI |
| | | | | SQL |
| 324 | 1063 | 1 | 1496 | ALCHIAVGQQMNLHWLHKIGLVVILASTVVAMSAVAQLWEDEW |
| | | | | EVLLISLQGTAPFLHVGAVAAVTMLSWIVAGQFARAERTSSQV |
| | | | | TILCTFFTVVFALYLAPLTISSPCIMEKKDLGPKPALIGHRGA |
| | | | | PMLAPEHTLMSFRKALEQKLYGLQADITISLDGVPFLMHDTTL |
| | | | | RRTTNVEEEFPELARRPASMLNWTTLQRLNAGQWFLKTDPFWT |
| | | | | ASSLSPSDHREAQNQSICSLAELLELAKGNATLLLNLRDPPRE |
| | | | | HPYRSSFINVTLEAVLHSGFPQHQVMWLPSRQRPLVRKVAPGF |
| | | | | QQTSGSKEAVASLRRGHIQRLNLRYTQVSRQELRDYASWNLSV |
| | | | | NLYTVNAPWLFSLLWCAGVPSVTSDNSHTLSQVPSPLWIMPPD |
| | | | | EYCLMWVTADLVSFTLIVGIFVLQKWRLGGIRSYNPEQIMLSA |
| | | | | AVRRTSRDVSIMKEKLIFSEISDGVEVSDVLSVCSDNSYDTYA |
| | | | | NSTATPVGPRGGGSHTKTLIERSGR |
| 325 | 1064 | 1899 | 776 | NSADYGDGPDSSDADPDSGTEEGVLDFSDPFSTEVKPRILLMG |
| | | | | LRRSGKSSIQKVVFHKMSPNETLFLESTNKICREDVSNSSFVN |
| | | | | FQIWDFPGQIDFFDPTFDYEMIFRGTGALIFVIDSQDDYMEAL |
| | | | | ARLHLTVTRAYKVNTDINFEVFIHKVDGLSDDHKIETQRDIHQ |
| | | | | RANDDLADAGLEKIHLSFYLTSIYDHSIFEAFSKVVQKLIPQL |
| | | | | PTLENLLNIFISNSGIEKAFLFDVVSKIYIATDSTPVDMQTYE |
| | | | | LCCDMIDVVIDISCIYGLKEDGAGTPYDKESTAIIKLNNTTVL |
| | | | | YLKEVTKFLALVCFVREESFERKGLIDYNFHCFRKAIHEVFEV |
| | | | | RMKVVKSRKVQNRLQKKKRATPNGTPRVLL |
| 326 | 1065 | 1181 | 346 | RTRGRDPGAGFRRTANKRCCRRRFLIGCGWLPLRSDWPLVSKM |
| | | | | LSKGLKRKREEEEEKEPLAVDSWWLDPGHAAVAQAPPAVASSS |
| | | | | LFDLSVLKLHHSLQQSEPDLRHLVLVVNTLRRIQASMAPAAAL |
| | | | | PPVPSPPAAPSVADNLLASSDAALSASMASLLEDLSHIEGLSQ |
| | | | | APQPLADEGPPGRSIGGAAPSLGALDLLGPATGCLLDDGLEGL |
| | | | | FEDIDTSMYDNELWAPASEGLKPGPEDGPGKEEAPELDEAELD |
| | | | | YLMDVLVGTQALERPPGPGR |
| 327 | 1066 | 1844 | 337 | LQEVKARRNTLHKEKDHLVNDYEQNMKLLQTKYDADINLLKQE |
| | | | | HALSASKASSMIEELEQNVCQLKQQLQESELQRKQQLRDQENK |
| | | | | FQMEKSHLKHIYEKKAHDLQSELDKGKEDTQKKIHKFEEALKW |
| | | | | KKWRQI*LDPN/LLREKQSKEFLWQLEDIRQRYEQQIVELKLE |
| | | | | HEQEKTHLLQQHNAEKDSLVRDHEREIENLEKQLRAANMEHEN |
| | | | | QIQEFKKRDAQVIADMEAQVHKLREELINVNSQRKQQLVELGL |
| | | | | LREEEKQRATREHEIVVNKLKAESEKMKIELKKTHAAETEMTL |
| | | | | EKANSKLKQIEKEYTQKLAKSSQIIAELQTTISSLKEENSQQQ |
| | | | | LAAERRLQDVRQKFEDEKKQLIRDNDQAIKVLQDELENRSNQV |
| | | | | RCAEKKLQHKELESQEQITYIRQEYETKLKGLMPASLRQELED |
| | | | | TISSLKSQVNFLQKRASILQEE/RDYISRQKVQPISR*LHERM |
| | | | | QRMRISRLCCGTSSSRFEDLDIVNCEISGIF |
| 328 | 1067 | 1149 | 238 | VINLVYLISSPRPELKPVDKESEVVMKFPDGFEKFSPPILQLD |
| | | | | EVDFYYDPKHVIFSRLSVSADLESRICVVGENGAGKSTMLKLL |
| | | | | LGDLAPVRGIRHAHRNLKIGYFSQHHV\EQL\DLNVQCLWELA |
| | | | | GHASFPG\RPEEEY\RHQLGFGMGISGEL\AMRPLCQPVLGAR |
| | | | | KKPKWPFAQMDYCPAPTFYIL\DEPTN\HLGHGRAIEALGPCL |
| | | | | QTISGVGVILVSHE*SALSRLVCREK\LWVC*G\GGVTRVERKD |
| | | | | FDQYRALLQGTVSAREGFPLGPPRLKDSPRDMGLVSQTPWGHH |
| | | | | VGYPLPGRG |
| 329 | 1068 | 26 | 674 | CSAVEVKMAARTAFGAVCRRLWQGLGNFSVNTSKGNTAKNGGL |
| | | | | LLSTNMKWVQFSNLHVDVPKDLTKPVVTISDEPDILYKRLSVL |
| | | | | VKGHDKAVLDSYEYFAVLAAKELGISIKVHEPPRKIERFTLLQ |
| | | | | SVHIYKKHRVQYEMRTLYRCLELEHLTGSTADVYLEYIQRNLP |
| | | | | EGVAMEVTKFCFFIFL\TQLEQLPEHIKEPIWETLSEEKEESK |
| | | | | S |
| 330 | 1069 | 2105 | 1283 | DFWDTAGQERFQSMHASYYHKTHACIMVFDVQRKVTHRNLSTW |
| | | | | YTELREFRPEIPCIVVANKIDGGAIPAPGC*QFTGDLPSYISS |
| | | | | SIPRAGNLQ*LVLPPTIRYNPWLVACILPTL*RSQLSRPALFP |
| | | | | RHRSLLTELFLGPVSQSSLPIPLSGMKASSGPPLQTFFPSLDR |
| | | | | QTNVLPSLY\ADINVTQKSFNFAKKFSLPLYFVSAADGTNVVK |
| | | | | LFNDAIRLAVSYKQNSQDFMDEIFQELENFSLEQEEEDVPDQE |
| | | | | QSSSIETPSEEVASPHS |
| 331 | 1070 | 1 | 1109 | GATPLGSVGGRTGKMDAATLTYDTLRFAEFEDFPETSEPVWIL |
| | | | | GRKYSIFTEKDEILSDVASRLWFTYRKNFPAIGGTGPTSDTGW |
| | | | | GCMLRCGQMIFAQALVCRHLGRDWRWTQRKRQPDSYFSVLNAF |
| | | | | IDRKDSYYSIHQIAQMGVGEGKSIGQWYGPNTVAQVLKKLAVF |
| | | | | DTWSSLAVHIAMDNTVVMEEIRRLCRTSVPCAGATAFPADSDR |
| | | | | HCNGFPAGAEVTNRPSPWRPLVLLIPLRLGLTDINEAYVETLK |
| | | | | HCFM\MPQSLGVIGGKPNSAH\YFIG*VG\EELIYLDPHTTQP |
| | | | | AVEPTDGCFIPDESFHCQHPPCRMSIAELDPSIAVVRGGHLST |
| | | | | QAFGAECCLGMTRKTFGFLRFFFSMLG |
| 332 | 1071 | 39 | 284 | ALCVVPFNTFHN\DFLLLDKEGTLDPVMDSFSTHWTTIGPADM |
| | | | | FFS\FRQHYKNFKSHGTNPSKSVWAHATCQSCAFPNLLGW |
| 333 | 1072 | 2 | 1484 | TRLAEFGTRDPCAQAPCEQQCEPGGPQGYSCHCRLGFRPAEDD |
| | | | | PHRCVDTDECQIAGVCQQMCVNYVGGFECYCSEGHELEADGIS |
| | | | | CSPAGAMGAQASQDLGDELLDDGEDEEDEDEAWKAFNGGWTEM |
| | | | | PGILWMEPTQPPDFALAYRPSFPEDREPQIPYPEPTWPPPLSA |
| | | | | PRVPYHSSVLSVTRPVVVSATHPTLPSAGQPPVIPATHPALSR |
| | | | | DHQIPVIAANYPDLPSAYQPGILSVSESAQPPAHQPPMISTKY |
| | | | | PELFPAHQSPMFPDTRVAGTQTTTHLPGIPPNHAPLVTTLGAQ |
| | | | | LPPQAPDALVLRTQATQLPIIPTAQPSLTTTSRSPVSPAHQIS |
| | | | | VPAATQPAALPTLLPSQSPTNQTSPISPTHPHSKAPQIPREDG |
| | | | | PSPKLALWLPSPAPTAAPTALGEAGLAEHSQRDDRWLLVALLV |
| | | | | PTCVFLVVLLALGIVYCTRCGPHAPNKRITDCYRWVIHAGSKS |
| | | | | PTEPMPPRGSLTGVQTCRTSV |
| 334 | 1073 | 1 | 1406 | LRVRRRPHLPAPPALRARRSDRRSSPAPAAFPPRPPHASPAPG |
| | | | | PAMAQAVWSRLGRILWLACLLPWAPAGVAAGLYELNLTTDSPA |
| | | | | TTGAVVTISASLVAKDNGSLALPADAHLYRFHWIHTPLVLTGK |
| | | | | MEKGLSSTIRVVGHVPGEFPVSVWVTAADCWMCQPVARGFVVL |
| | | | | PITEFLVGDLVVTQNTSLPWPSSYLTKTVLKVSFLLHDPSNFL |
| | | | | KTAKFLYSWDFGDGTQMVTEDSVVYYNYSIIGTFTVKLKVVAE |
| | | | | WEEVEPDATPAVKQKTGDFSASLKLQETLRGIQVLGPTLIQTF |
| | | | | QKMTVTLNFLGSPPLTVCWRLKPECLPLEEGECHPVSVASTAY |
| | | | | NLTHTFRDPGDYCFSIPAENIISKTHQYHKIQVWPSRIQPAVF |
| | | | | AFPCATLITVMLAFIMYMTLPNATQQKDMVENPEPPSGVRCCC |
| | | | | QMCCGPFLLETPSEYKEIVRENHGLLPPLYKSVKTYTV |
| 335 | 1074 | 1 | 866 | VVEFAFQLSSVSVCLTVSFGWQLGTVSSCLSRDWFLKGNLLII |
| | | | | IVSVLIILPLALMKHLGYLGYTSGLSLTCMLFFLVSVIYKKPQ |
| | | | | LGCAIGHNETAIESEALVGLPSQGLNSSCEAQMFTVDSQMSYT |
| | | | | VPIMAFAFVCIWEVLPIYTELCRPSKRRMQAVANVSIGAMFCM |
| | | | | YGLTATFGYLTFYSSVKAEMLHMYSQKDPLILCVRLAVLLA\V |
| | | | | TLTVPVVLFPIRRALQQLLFPGKAFSWPRHVAIALILLVLVNV |
| | | | | LVICVPTIRDIFGVIGSTSAPSLIFILPSCI |
| 336 | 1075 | 3 | 825 | GAGSKSSMMQLMHLESFYEK\PPPGLIKEDDTKPEDCIPDVPG |
| | | | | NEHAREFLAHTPTKGLWMPLEKEVKVKH/CTFHWIAS*FLGDG |
| | | | | KFIPKATRLKDVWVSN*FTCLFWDLTRFIHDCIFF*NWSLMNK |
| | | | | NFNIIY*FFISLR*NTLILQKYFPFSLKLGWHCKWYGHRTGYK |
| | | | | ECPFFIKDNQKLQQFRVAHEDFMYDIIRDNKQHEKNVRIQQLK |
| | | | | QLLEDSTSGEDRSSSSSSECKEKHKKKKKKEKHKKRKKEKKKK |
| | | | | KKRKHKSSKSNEGSDSE |
| 337 | 1076 | 3 | 2451 | EIAGAAAENMLGSLLCLPGSGSVLLDPCTGSTISETTSEAWSV |
| | | | | EVLPSDSEAPDLKQEERLQELESCSGLGSTSDDTDVREVSSRP |
| | | | | STPGLSVVSGISATSEDIPNKIEDLRSECSSDFGGKDSVTSPD |
| | | | | MDEITHDFLYILQPKQHFQHIEAEADMRIQLSSSAHQLTSPPS |
| | | | | QSESLLAMFDPLSSHEGASAVVRPKVHYARPSHPPPDPPILEG |
| | | | | AVGGNEARLPNFGSPMF*LPAEMEAFKQRHS/YTPERLVRSRS |
| | | | | S\DIVSSVRRPMSDPSWNRRP\GNEERELPPAAAIGATSLVAA |
| | | | | PHSSSSSPSKDSSRGETEERKDSDDEKSDRNRPWWRKRFVSAM |
| | | | | PKAPIPFRKKEKQEKDKDDLGPDRFSTLTDDPSPRLSAQAQVA |
| | | | | EDILDKYRNAIKRTSPSDGAMANYESTEVMGDGESAHDSPRDE |
| | | | | ALQNISADDLPDSASQAAHPQDSAFSYRDAKKKLRLALCSADS |
| | | | | VAFPVLT\HSTRNGLPDHTDPEDNEIVCFLKVQIAEAINLQDK |
| | | | | NLMAQLQETMRCVCRFDNRTCRKLLASIAEDYRKRAPYIAYLT |
| | | | | RCRQGLQTTQAHLERLLQRVLRDKEVANRYFTTVCVRLLLESK |
| | | | | EKKEREFIQDFQKLTAADDKTAQVEDFLQFLYGAMAQDVIWQN |
| | | | | ASEEQLQDAQLAIERSVMNRIFKLAFYPNQDGDILRDQVLHEH |
| | | | | IQRLSKVVTANHRALQIPEVYLREAPWPSAQSEIRTISAYKTP |
| | | | | RDKVQCILRMCSTIMNLLSLANEDSVPGADDFVPVLVFVLIKA |
| | | | | NPPCLLSTVQYISSFYASCLSGEESYWWMQFTAAVEFIKTIDD |
| | | | | RK |
| 338 | 1077 | 536 | 1305 | WPMSLARGHGDTAASTAAPLSEEGEVTSGLQALAVEDTGGPSA |
| | | | | SAGKAEDEGEGGREETEREGSGGEEAQGEVPSAGGEEPAEEDS |
| | | | | EDWCVPCSDEEVELPADGQPWMPPPSEIQRLYELLAAHGTLEL |
| | | | | QAEILPRRPPTPEAQSEEERSDEEPEAKEEEEEKPHMPTEFDF |
| | | | | DDEPVTPKDSLIDRRRTPGSSARSQKREARLDKVLSDMKRHKK |
| | | | | LEEQILRTGRDLFSLDSEDPSPASPPLRSSGSSLFPRQRKY |
| 339 | 1078 | 2 | 1771 | LGRGTFGQVV*CWKRGTNEIVAIKILKNHPSYARQGQIEVSIL |
| | | | | ARLSTESADDYNFVRAYECFQHKNHTCLVFEMLEQNLYDFLKQ |
| | | | | NKFSPLPLKYIRPVLQQVATALMKLKSLGLIHADLKPENIMLV |
| | | | | DPSRQPYRVKVIDFGSASHVSKAVCSTYLQSRYYRAPEIILGL |
| | | | | PFCAEIDMWSLGCVIAELFLGWPLYPGASEYDQI/RYISQTQG |
| | | | | LPAEYLLSAGTKTTRFFNRDTDSPYPLWRLKTPDDHEAETGIK |
| | | | | SKEARKYIFNCLDDMAQVNMTTDLEGSDMLVEKAVRREFIDLL |
| | | | | KKMLSIDSVKRFSPVGSLNHPFVTMSLFLDFPHSTHVKSCFQN |
| | | | | MEICKRRVNMYDTVNQSKTPFITHVAPSTSTNLTMTFNNQLTT |
| | | | | VHNQPSAASMAAVAQRSMPLQTGTAQICARPDPFQQALIVCPP |
| | | | | GFQGLQASPSKHAGYSVRMENAVPIVTQAPGAQPLQIQPGLLA |
| | | | | QQAQPSGTQQILLPPAQQQLTGVATHTSVQHAAVIPETMAGTQ |
| | | | | QLADWRNTHAHGSHYNPIMQQPALLTGHVTLPAAQPLNVGVAH |
| | | | | VMRQQPTSTTSSRKSKQHLYCGRARVSKIASR |
| 340 | 1079 | 2 | 2721 | EFAICRYPLGMSGGQIPDEDITASSQWSESTAAKYGRLDSEEG |
| | | | | DGAWCPEIPVEPDDLKEFLQIDLHTLHFITLVGTQGRHAGGHG |
| | | | | IEFAPMYKINYSRDGTRWISWRNRHGKQVLDGNSNPYDIFLKD |
| | | | | LEPPIVARFVRFIPVTDHSMNVCMRVELYGCVWLDGLVSYNAP |
| | | | | AGQQFVLPGGSIIYLNDSVYDGAVGYSMTEGLGQLTDGVSGLD |
| | | | | DFTQTHEYHVWPGYDYVGWRNESATNGYIEIMFEFDRIRNFTT |
| | | | | MKVHCNNMFAKGVKIFKEVQCYFRSEASEWEPNAISFPLVLDD |
| | | | | VNPSARFVTVPLHIRMASAIKCQYHFADTWMMFSEITFQSDAA |
| | | | | MYNNSEALPTSPMAPTTYDPMLKVDDSNTRILIGCLVAIIFIL |
| | | | | LAIIVITLWRQFWQKMLEKASRRMLDDEMTVSLSLPSDSSMFN |
| | | | | NNRSSSPSEQGSNSTYDRIFPLRPDYQEPSRLKRKLPEFAPGE |
| | | | | EESGCSGVVKPVQPSGPEGVPHYAEADIVNLQGVTGGNTYSVP |
| | | | | AVTIDLLSGKRCGCGREFPPGKLLTFKEKLGEGQFGEVHLCEV |
| | | | | EGMEKFKDKDFALDVSANQPVLVAVKMLRADANKNARNDFLKE |
| | | | | IKIMSRLKDPNIIHLLSVCITDDPLCMITEYMENGDLNQFLSR |
| | | | | HEPPNSSSSDVRTVSYTNLKFMATQIASGMKYLSSLNFVHRDL |
| | | | | ATRNCLVGKNYTIKIADFGMSRNLYSGDYYRIQGRAVLPIRWM |
| | | | | SWESILLGKFTTASDVWAFG\VTLWE\TFTFCQRKGPYS\QLS |
| | | | | \DETGY*RNTGEFFPRPKGGQTYLPSTSPFVPDSCVIKLMLSC |
| | | | | WRRDTKNRPSFQEIHLLLLQQGDERCCQCLAMFLRLRSSLQDL |
| | | | | PLTHAYATPSGHLMKLRDRGLFALPSFPGHPHSLPLTHIYFFF |
| | | | | FTLKN |
| 341 | 1080 | 916 | 3 | CSASPLRPGLLAPDLLYLPGAGQPRRPEAEPGQKPVVPTLYVT |
| | | | | EAEAHSPALPGLSGPQPKWVEVEETIEVRVKKMGPQGVSPTTE |
| | | | | VPRSSSGELFTLPGATPGGDPNSNNSNNKLLAQEAWAQGTAMV |
| | | | | GVREPLVFRVDARGSVDWAASGMGSLEEEGTMEEAGEEEGEDG |
| | | | | DAFVTEESQDTHSLGDRDPKILTHNGRMLTLADLEDYVPGEGE |
| | | | | TFHCGGPGPGAPDDPPCEVSVIQREIGEPTVG\SLCCSAWGMH |
| | | | | WVPEALSASLGLSPMGR\HHRDPRSVALRAPPSSCGRPRLGLW |
| | | | | AVLPG |
| 342 | 1081 | 862 | 444 | QGLAAEFLQVPAVTRAYTAACVLTTAAVQLELLSPFQLYFNPR |
| | | | | LVFRKFQAPFLPWALMGFSLLLGNSILVDLLGIAVGHIYYFLE |
| | | | | DVFPNQPGGKRLLQTPGFLGLQSSKAPAGSSLTIWTQQSQGGP |
| | | | | GTAGELAAPS |
| 343 | 1082 | 3658 | 337 | EKNALEPTVYFGMGV*APQVPRFQQRITGYQYYLQLRKDIWEE |
| | | | | GIPCTLEQPIHLAGLAVQAIFGDFDQYESQDFLQKFALFPVGW |
| | | | | LQDEKVLEEATQKVALLHQKYRGLTAPDAEMLYMQEVERMDGT |
| | | | | GEESYPAKDSQGSDISIGACLEGIFVKHKNGRHPVVFRWHDIA |
| | | | | NMSHNKSFFALELANKEETIQFQTEDMETAKYIWRLCVARHKF |
| | | | | YRLNQCNLQTQTVTVNPIRRRSSSRMSLPKPQPYVMPPPP\QL |
| | | | | HYNGHYTEPYASSQDNLFVPNQEG\YYGQFQTSLNRAQIDFNG |
| | | | | RIR\NASVYSAHSTNSLNNPQPYLQPSPMSSNPSITGSDVMRP |
| | | | | DYLPSHRHSAVIPPSYRPTPDYETVMKQLNRGLVHAERQSHSL |
| | | | | RNLNIGSSYAYSRPAALVYSQPEIREHAQLPSPAAAHCPFSLS |
| | | | | YSFHSPSPYPYPAERRPVVGAVSVPELTNAQLQAQDYPSPNIM |
| | | | | RTQVYRPPPPYPPPRPANSTPDLSRHLYISSSNPDLITRRVHH |
| | | | | SVQTFQEDSLPVAHSLQEVSEPLTAARHAQLHKRNSIEVAGLS |
| | | | | HGLEGLRLKERTLSASAAEV\APRAVSVGSQP\SVFTERTQRE |
| | | | | GPEEAEGLRYGHKKSLSDATMLIHSSEEEEDEDFEEESGARAP |
| | | | | PARAREPRPGLAQDPPGCPRVLLAGPLHILEPKAHVPDAEKRM |
| | | | | MDSSPVRTTAEAQRPWRDGLLMPSMSESDLTTSGRYRARRDSL |
| | | | | KKRPVSDLLSGKKNIVEGLPPLGGMKKTRVDAKKIGPLKLAAL |
| | | | | NGLSLSRVPLPDEGKEVATRATNDERCKILEQRLEQGMVFTEY |
| | | | | ERILKKRLVDGECSTARLPENAERNRFQDVLPYDDVRVELVPT |
| | | | | KENNTGYINASHIKVSVSGIEWDYIATQGPLQNTCQDFWQMVW |
| | | | | EQGIAIIAMVTAEEEGGREKSFRYWPRLGSRHNTVTYGRFKIT |
| | | | | TRFRTDSGCYATTGLKMKHLLTGQERTVWHLQYTDWPEHGCPE |
| | | | | DLKGFLSYLEEIQSVRRHTNSTSDPQSPNPPLLVHCSAGVGRT |
| | | | | GVVILSEIMIACLEHNEVLDIPRVLDMLR\QQRMMLVQTLCQY |
| | | | | TFVYRVLIQVPEKAPRLILSSPQFPYGAQSCEAFTA |
| 344 | 1083 | 6 | 304 | RKKQKLAEE*VELSKLADLKDAEAVQKFFLEEI*L\GEEILAK |
| | | | | GVDHLTNPSAVCGQPQWLLQVLQQTLPLPVIQMLLTKPLPVNQ |
| | | | | RLVSAG/SLAXDDVE |
| 345 | 1084 | 1255 | 635 | SFCLHEFGWLGSSPQSDHPVPALLGLGAFVHHSLLQVHSSPGA |
| | | | | GPVSFLFLGESCSPVDEPRCVPSCAFGFLSCFPLLNSAALERG |
| | | | | LFFFVVFFFLESGSCQVARAGVRD/RDRGSLQPPPPGLKQFCL |
| | | | | SLPSRWDHRHPPPLRVP*FVFVFLVELGFHHVAQAGLKLLTLS |
| | | | | DPPAPASHSAGITGVSQRDQPVLFLRWASCSELVG |
| 346 | 1085 | 116 | 415 | EGFPGRSLSGGLCCRLRRRFPIDGYRPRRRRRWSCCPSGVRPV |
| | | | | RRMSQKSWIESTLTKRECVYIIPSSKDPHRCLPGCQICQQLVR |
| | | | | RGFTVLARMVSIS |
| 347 | 1086 | 918 | 760 | QNSTCLTAQTHSLLQHQPLQLTTLLDQYIREQREKDSVMSANG |
| | | | | KPDPDTVPDS |
| 348 | 1087 | 1 | 750 | LNPWKNALQDFCLPFLRITSLLQHHLFGEDLPSCQEEEEFSVL |
| | | | | ASCLGLLPTFYQTEHPFISASCLDWPVPAFDIITHWCFEIKSF |
| | | | | TERHAEQGKALLIQESKWKLPHLLQLPENYNTIFQYYHRKTCS |
| | | | | VCTKVPKDPAVCLVCGTFVCLKGLCCKQQSYCECVLHSQNCGA |
| | | | | GTGIFLLINASVIIIIRGHRFCLWGSVYLDAHGEEDRDLRRGK |
| | | | | PLYICKERYKVLEQQWISHTFDHINKRWGPHYNGL |
| 349 | 1088 | 3 | 1374 | KGQLVNLLPPENFPWCGGSQGPRMLRTCYVLCSQAGPRSRGWQ |
| | | | | SLSFDGGAFHLKGTGELTRALLVLRLCAWPPLVTHGLLLQAWS |
| | | | | RRLLGSRLSGAFLRASVYGQFVAGETAEEVKGCVQQLRTLSLR |
| | | | | PLLAVPTEEEPDSAAKSGEAWYEGNLGAMLRCVDLSRGLLEPP |
| | | | | SLAEASLMQLKVTALTSTRLCKELASWVRRPGASLELSPERLA |
| | | | | EAMDSGQNLQVSCLNAEQNQHLRASLSRLHRVAQYARAQHVRL |
| | | | | LVDAEYTSLNPALSLLVAALAVRWNSPGEGGPWVWNTYQACLK |
| | | | | DTFERLGRDAEAAHRAGLAFGVKLVRGAYLDICERAVAQL\HG\ |
| | | | | MEDPPTQADYEATS\QSYS\RCLELMLTHVARHGPMCHLMVAS |
| | | | | HNEESVRQATK\GQAGYVVYKSIPYGSLEEVIPYLIRRAQENR |
| | | | | SVLQGARREQELLSQKKWRRLLPGCRRIPH |
| 350 | 1089 | 1036 | 306 | VVEFGEMSTARAPEGLRWFQLYVHPDLQLNKQLIQRVESLGFK |
| | | | | ALVITLDTPVCGNRRHDIRNQLRRNLTLTDLQSPKKGNAIPYF |
| | | | | QMTPISTSLCWNDLSWFQSITRLPIILKGILTKEDAELAVKHN |
| | | | | VQGIIVSNHGGRQLDEVLASIDALTEVGAAE*GNMKYYLDAGV |
| | | | | RTGNDVQKALALGAKCIFLGRPILWGLACKGEHGVKEVLNILT |
| | | | | NEFHTSMA\LTGCRSVAEINRNLVQFSRL |
| 351 | 1090 | 1229 | 957 | FFLRWSFTL\LPRLE/CQWLNLGSLQPPPPGFK*SSCLRLLSS |
| | | | | WGLQVPTSMLG*FFCIFSREGISPCWPGWSQTPKVIHLPRPPR |
| | | | | VKRKQA |
| 352 | 1091 | 1145 | 365 | LLCFVHTALQSFQGELYEPHVVIAIVVFLVKLGICK*RASWRK |
| | | | | KVTLVVK*S/LKICFTKYGSCYHPGEKSSSWLFN*RMVNDCLA |
| | | | | TSCSNRSFVIQQIPSSNLFMVVVDSSCLCESVAPITMAPIEIR |
| | | | | YILLCAGPLTTTETSKGYQW*GNLGEKY*RRKITSFPLLERES |
| | | | | S*ESCHCQILTSEMQSRKCQSLETCLNYSQHNESLKCERLKAQ |
| | | | | KIRRRPESCHGFHPEENARECGGAPSLQAQTVLLLLPLLLMLF |
| | | | | SR |
| 353 | 1092 | 1140 | 790 | VPSPTHDPKPAEAPMPA*PAPPGPASPGGAAEPPAAARAGGSP |
| | | | | TAVRSILTKERRPEGGYKAVWFGEDIGTEADVVVLNAPTLDVD |
| | | | | GASDSGSGDEGEGAGRGGGPYDAPGGDDSYI |
| 354 | 1093 | 3 | 2293 | LISLAGPTDDIQSTGPOVHALNILRALFRDTRIGENIIPYVAD |
| | | | | GAKAAILGPTSPVWAVRUSSTLLFSALITRIFGVKRAKDEHSK |
| | | | | TNRMTGREPFSRFPELYPFLLKQLETVANTVDSDMGEPNRHPS |
| | | | | MFLLLLVLERLYASPMDGTSSALSMGPFVPFIMRCGHSPVYHS |
| | | | | REMAARALVPFVMIDHIPNTIRTLLSTLPSCTDQCFRQNHIHG |
| | | | | TLLQVFHLVQAYSDSKHGTNSDFQHELTDITVCTKAKLWLAKR |
| | | | | QNPCLVTRAVYIDILFLLTCCLNRSAKDNQPVLESLGFWEEVR |
| | | | | GIISGSELITGFPWAFKVPGLPQYLQSLTRLAIAAVWAAAAKS |
| | | | | GERETNVPISFSQLLESAFPEVRSLTLEALLEKFLAAASGLGE |
| | | | | KGVPPLLCNMGEKFLLLAMKENHPECFCKILKILHCMDPGEWL |
| | | | | PQTEHCVHLTPKEFLIWTMDIASNERSEIQSVALRLASKVISH |
| | | | | HMQTCVENRELIAAELKQWVQLVILSCEDHLPTESRLAVVEVL |
| | | | | TSTTPLFLTNPHPILELQDTLAIWKCVLTLLQSEEQAVRDAAT |
| | | | | ETVTTAMSQENTCQSTEFAFCQVDASIALALALAVLCDLLQQW |
| | | | | DQLAPGLPILLGWLLGESDDLVACVESMHQVEEDYLFEKAEVN |
| | | | | FWAETLIFVKYLCKHLFCLLSKSGWRPPSPEMLCHLQRMVSEQ |
| | | | | C\HLLSQFFRELPPAAEFVKTVEFTRLRIQEERTLACLRKLAF |
| | | | | LEGKEGEDTLVLSVWDSYAESRQLTLPRTEAAC |
| 355 | 1094 | 25 | 1265 | HAFRPIALQRGVSFRGCSNQYAESRRLQGESGSRAFAHLMESL |
| | | | | LQHLDRFSELLAVSSTTYVSTWDPATVRRALQWARYLRHIHRR |
| | | | | FGRHGPIRTALERRLHNQWRQBGGFGRGPVPGUlNFQALGHCD |
| | | | | VLLSLRLLENRALGDAARYHLVQQLPPGPGVRDADEETLQESL |
| | | | | ARLARRRSAVHMLRFNGYRENPNLQEDSLMKTQAELLLERLQE |
| | | | | VGKAEAERPARFLSSLWERLPQNNFLKVIAVALLQPPLSRRPQ |
| | | | | EELEPGIHKSPGEGSQVLVHWLLGNSEVFAAFCRALPAGLLTL |
| | | | | VTSRHPALSPVYLGLLTDWGQRLHYDLQKGIWVGTESQDVPWE |
| | | | | ELHNRFQSLCQAPPPLKDKVLTALETCKAQDGDFEEPGLSIWT |
| | | | | DLLLAIARSGAFRKRQVLGLSAGLSSV |
| 356 | 1095 | 3 | 1027 | SHLIQHQRIHT*E*AHECNECGKAFSQTSCLIQHHKMHRKEKS |
| | | | | YECNEYEGSFSHSSDLILQQEVLTRQKAFDCDVWEKNSSQRAH |
| | | | | LVQHQSIHTKE/K/PHECNEDGKIF/NQIQA/LIQHLRVHTRE |
| | | | | K\YVCTACGKAPSnSSAIAQHQIIHTREKPSECDE*RKGISVK |
| | | | | LLIDSC/RIYTSEKSYKCIECGKFFMKLVFSYLSUIWRIHMGI |
| | | | | KFHCCNECEKAISQRNYLV*YQIHAMQKDYKCN/EACMCVRRF |
| | | | | SHNPTLIQHQRIYT*ENLFGCSK/C/GRSFNRSLTSLCHIRIS |
| | | | | I/RRQEFDVTQMEKLDTTFQA/STQHRNNGEKIVDYLFMKLLI |
| | | | | HSPNLFHCTKI |
| 357 | 1096 | 2638 | 2867 | AVTLTAKICSFTPEPSETMSPPAGTNNSRHAALRAVTLPVKVC |
| | | | | SFTPEPARSRTHQKEETPNTSEHQKEQTPEAPP |
| 358 | 1097 | 4747 | 4550 | MAYSWQTDPNPNESHEKQYEHQEFLFVNQPHSSSQVSLGFDQI |
| | | | | VDEISGKIPHYESEIDENTFFVPTAPKWDSTGHSLNEAHQISL |
| | | | | NEFTSKSRELSWHQVSKAPAIGFSPSVLPKPQNTNKECSWGSP |
| | | | | IGKHHGADDSRFSILAPSFTSLDKINLEKELENENHNYHIGFE |
| | | | | SSIPPTNSSPSSDFMPKEENKRSGHVNIVEPSLMLLKGSLQPG |
| | | | | MWESTWQKNIESIGCSIQLVEVPQSSNTSLASFCNKVKKIRER |
| | | | | YHAADVNFNSGKIWSTTTAFPYQLFSKTKFNIHIFIDNSTOPL |
| | | | | HFMPCANYLVKDLIAEILHFCTNDQLLPKDHILSVWGSEEFLQ |
| | | | | NDHCLGSHKMFQKDKSVIQLHLQKSREAPGKLSRKHEEDHSQF |
| | | | | YLNQLLEFMHIWKVSRQCLLTLIRKYDFHLKYLLKTQENVYNI |
| | | | | IEEVKKICSVLGCVETKQITDAVNELSLKLQRKGENFYQSSET |
| | | | | SAKGLIEICVTTELSTSIYQLINVYCNSFYADFQPVVPRCTSY |
| | | | | LNPGLPSHLSFTVYAAHNIPETWVHRINFPLEIKSLPRESMLT |
| | | | | VKLFGIACATNNANLLAWTCLPLFPKEKSILGSMLFSMTLQSE |
| | | | | PPVEMITPGVWDVSQPSPVTLQIDFPATGWEYMKPDSEENRSN |
| | | | | LEEPLKECIKHIARLSQKQTPLLLSEEKKRYLWFYRFYCNNEN |
| | | | | CSLPLVLGSAPGWDERTVSENHTILRRWTFSQPLEALGLLTSS |
| | | | | FPDQEIRXVAVQQLNNLKNDELLEYLPQLVQAVKFEWNLESPL |
| | | | | VQLLLHRSLQSIQVQHRLYWLLKNARNEAYFKSWYQKLLAALQ |
| | | | | FCAGKALNDEFSKEQKLIKILGDIGERVKSASDRQRQEVLKKE |
| | | | | IGRLEEFFQDVNTCELPLNPALCIKGIDHDACSYFTSNALPLK |
| | | | | ITFINANLMGKNISIIFKAGDDLRQDMLVLQLIQVMDNIWLQE |
| | | | | GLDMQMIIYRCLSTGKDQDLVQMVPDAVTLAKIHRHSGLIGPL |
| | | | | KENTIKKWFSQHNHLKADYEKALRNFFYSCAGWCVVTFILGVC |
| | | | | DRHNDNIMLTKSGHMFHIDFGKFLGHAQTFGGIKRDRAPFIFT |
| | | | | SEM\EYFITEGG\KNPQHFQDFV\ELCCRAYNIIRKHSQLLL\ |
| | | | | NLL\EMMLYAG\LPELSGI\QDLKYVYNNLRPQDTDLEATSHF |
| | | | | TKKIKESLECFPVKLNNLIHTLAQMSAISPAKSTSQTFPQESC |
| | | | | LLSTTRSIERATILGFSKKSSNLYLIQVTHSNNETSLTEKSFE |
| | | | | QFSKLHSQLQKQFASLTLPEFPHWWHLPFTNSDHRRFRDLNHY |
| | | | | MEQILNVSHEVTNSDCVKSFFLSEAGQQTVEESSPVYLGEKFP |
| | | | | DKKPKVQLVISYEDVKLTILVKHMKNIHLPDGSAPSAHVEFYL |
| | | | | LPYPSEVRRRKTKSVPKCTDPTYNEIVVYDEVTELQGHVLMLI |
| | | | | VKSKTVFVGAINIRLCSVPLDKEKWYPLGNSII*PLLLFYTSN |
| | | | | FMQSVLH |
| 359 | 1098 | 679 | 346 | FFLRWSLDSVTQAGVQSHDLSSLQPPPPGFKQSSLFGLPSSWE |
| | | | | *RWVPPCPANFFVFLVETGFRHVGQAGLELLTSNDLPVSACQS |
| | | | | AGITGVTTVPQRKSMILYEVTICYP |
| 360 | 1099 | 2 | 1601 | FVREIRGPAVPRKTSAEDRHRHGPHAHSPELQRTGRDYSLDYL |
| | | | | PFRLWVGIWVATFCLVLVATEASVLVRYFTRFTEEGFCALISL |
| | | | | IFIYDAVGKMLNLTHTYPIQKPGSSAYGCLCQYPGPGGNESQW |
| | | | | IRTRPKDRDDIVSMDLGLINASLLPPPECTRQGGHPRGPGCHT |
| | | | | VPDIAFFSLLLFLTSFFFANALKCVKTSRFFPSVVRKGLSDPS |
| | | | | SVLAILLGCGLDAFLGLATPKLMVPREFKPTLPGRGWLVSPFG |
| | | | | RNPWWWSVAAALPALLLSILIFNDQQITAVILNRMEYRLQKGA |
| | | | | GFHLDLFRVAVLMLLTSALGLPWYVSATVISLAHMDSLRRESR |
| | | | | ACAPGERPNFLGIREQRLTGLVVFILTGASIFLAPVLKFIPMP |
| | | | | VLYGIFLYMGVAALSSIQFTNRVKLLL\MPAKHQPDLLLLRHV |
| | | | | PLTRVHLFTAISFA\CLGLLW\IIKSTPAAIIFPLMLIRGLVGV |
| | | | | RKALERVFSPQELLWLDELMPEEERSIPEKGLEPEHSFSGSDS |
| | | | | EDSELMYQPKAPEINISVN*LE*EFVREIRGPAVPRLTSAEDR |
| | | | | HRHGPHAHSPELQRTGRDYSLDYLPFRLWVGIWVATPCLVLVA |
| | | | | TEASVLVRYFTRFTEEGFCALISLIFIYDAVGKMLNLTHTYPI |
| | | | | QKPGSSAYGCLCQYPGPGGNESQWIRTRPKDRDDIVSMDLGLI |
| | | | | NASLLPPPECTRQGGHPRGPGCHTVPDIAFFSLLLFLTSFFFA |
| | | | | MALKCVKTSRFFPSVVRKGLSDFSSVEAILLGCGLDAFLGLAT |
| | | | | PKKMVPREFKPTLPGRGWLVSPFGANPWWWSVAAALPALLLSI |
| | | | | LIFMDQQITAVILNRMEYRLQKGAGFHLDLFCVAVLMLLTSAL |
| | | | | GLPWYVSATVISLAHMDSLRRESRACAPGERPNFLGIREQRLT |
| | | | | GLVVFILTGASIFLAPVLKFIPMPVKYGIFLYMGVAALSSIQF |
| | | | | TNRVKLLLDASKTPRRPATLAACASDQGPPLHSHQLCPVWGCF |
| | | | | GIIKSTPAAIIFPKMLLGLVGVRKALERVFSPQELLWLDELMP |
| | | | | EEERSIPEKGLEPEHSFSGSDSEDSELMYQPKAPEINISVN |
| 361 | 1100 | 1 | 2636 | MGLKARRAAGAAGGGGDGGGGGGGAANPAGGDAAAAGDEERKV |
| | | | | GLAPGDVEQVTLALGAGADKDGTLLLEGGGRDEGQRRTPQGIG |
| | | | | LLAKTPLSRPVKRNNAKYRRIQTLIYDALERPRGWALLYH\AL |
| | | | | VFLIVLG\CLILAVL\TTFKEYETVSGDWLLLLETFAIFIFGA |
| | | | | EFALRIWAAGCCCRYKGWRGRLKFARKPLCMLDIFVLIASVPV |
| | | | | VAVGNQGNVLATSLRSLRFLQILRMLRDGPGEGGTWKLLG\SA |
| | | | | ICAHSKELITAWYIGFLTLILSSFLVYLVEKDVPEVDAQGEEM |
| | | | | KEEFETYADALWWGLITLATIGYGDKTPKTWEGRLIAATFSLI |
| | | | | GVSFFALPAGILGSGLALKVQEQHRQKHFEKRRKPAAELIQAA |
| | | | | WRYYATNPNRIDLVATWRFYESVVSFPFFRKEQLEAASSQKLG |
| | | | | LLDRVRLSNPRGSNTKGKLFTPLNVDAIEESPSKEPKPVGLNN |
| | | | | KERFRTAFRMKAYAFWQSSEDAGTGDPMAEDRGYGNDFPIEDM |
| | | | | IPTLKAAIRAVRILQFRLYKKKFKETLRPYDVKDVIEQYSAGH |
| | | | | LDMLSRIKYLQTRIDMIFTPGPPSTPKHKKSQKGSAFTFPSQQ |
| | | | | SPRNEPYV\ARPST\SEI\EDQRH*WGKFVKSLKGQV\QGLGR |
| | | | | KLDFLVDMHMQHMERLQVQVTEYYPTKGTSSPAEAEKKEDNRY |
| | | | | SDLKTIICNYSETGPPEPPYSFHQVTIDKVSPYGFFAHDPVNL |
| | | | | PRGGPSSGKVQATPPSSATTYVERPTVLPILTLLDSRVSCHSQ |
| | | | | ADLQGPYSDRISPRQRRSITRDSDTPLSLMSVNHEELERSPSG |
| | | | | FSISQDRDDYVFGPNGGSSWMREKRYLAEGETDTDTDPFTPSG |
| | | | | SMP\LSSTGDGISDSVWTPSNKPI |
| 362 | 1101 | 1 | 5433 | RTRGIIEFDPKYTAFEVEEDVGLIMIPVVRLHGTYGYVTADFISQSSSASPGG |
| | | | | VDYILHGSTVTFQHGQNLSFINISIIDDNESEFEEPIEILLTGATGGAVLGRH |
| | | | | LVSRIIIAKSDSPFGVIRFLNQSKISIANPNSTMILSLVLERTGGLLGETQVN |
| | | | | WETVGPNSQEALLPQNRDIADPVSGLFYFGEGEGGVRTIILTIYPHEEIEVEE |
| | | | | TFIIKLHLVKGEAKLDSRAKDVTLTIQEFGDPNGVVQFAPETLSKKTYSEPLA |
| | | | | LEGPLLITFFVRRVKGTFGEIMVYWELSSEFDITEDFLSTSGFFTIADGESEA |
| | | | | SFDVHLLPDEVPEIEEDYVIQLVSVEGGAELDLEKSITWFSVYANDDPHGVFA |
| | | | | LYSDRQSILIGQNLIRSIQINITRLAGTFGDVAVGLRISSDHKEQPIVTENAE |
| | | | | RQLVVKDGATYKVDVVPIKNQVFLSLGSNFTLQLVTVMLVGGRFYGMPTILQE |
| | | | | AKSAVLPVSEKAANSQVGFESTAFQLMNITAGTSHVMISRRGTYGALSVAWTT |
| | | | | GYAPGLEIPEFIVVGNMTPTLGSLSFSHGEQRKGVFLWTFPSPGWPEAFVLHL |
| | | | | SGVQSSAPGGAQLRSGFIVAEIEPMGVFQFSTSSRNIIVSEDTQMIRLHVQRL |
| | | | | FGFHSDLIKVSYQTTAGSAKPLEDFEPVQNGELFFQKFQTEVDFEITIINDQL |
| | | | | SEIEEFFYINLTSVEIRGLQKPDVNWSPRLNLDFSVAVITILDNDDLAGMDIS |
| | | | | FPETTVAVAVDTTLIPVETESTTYLSTSKTTTILQPTNVVAIVTEATGVSAIP |
| | | | | EKLVTLHGTPAVSEKPDVATVTANVSIHGTFSLGPSIVYIEEEMKNGTFNTAE |
| | | | | VLTRRTGGFTGNVSITVKTFGERCAQMEPNALPFRGIYGISNLTWAVEEEDFE |
| | | | | EQTLTLIFLDGERERKVSVQILDDDEPEGQEFFYVFLTNPQGGAQIVEGKDDT |
| | | | | GFAAFAMVIITGSDLHNGIIGFSEESQSGLELREGAVMRRLHLIVTRQPNRAF |
| | | | | EDVKVFWRVTLNKTVVVLQKDGVNLMEELQSVSGTTTCTMGQTKCFISIELKP |
| | | | | EKVPQVEVYFFVELYEATAGAAINNSARFAQIKILESDESQSLVYFSVGSRLA |
| | | | | VAHKKATLISLQVARDSGTGLMMSVNFSTQELRSAETIGRTIISPAISGKDFV |
| | | | | ITEGTLVFEPGQRSTVLDVILTPETGSLNSFPKRFQIVLFDPKGGARIDKVYG |
| | | | | TANITLVSDADSQAIWGLADQLHQPVNDDILNRVLHTISMKVATENTDEQLSA |
| | | | | MMHLIEKITTEGKIQAFSVASRTLFYEILCSLINPKRKDTRGFSHFAELTENF |
| | | | | AFSLLTNVTCGSPGEKSKTILDSCPYLSILALHWYPQQINGHKFEGKEGDYIR |
| | | | | IPERLLDVQDAEIMAGKSTCKLVQFTEYSSQQWFISGNNLPTLKNKVLSLSVK |
| | | | | GQSSQLLTNDNEVLYRIYAAEPRIIPQTSLCLLWNQAAASWLSDSQFCKVIEE |
| | | | | TADYVECACLHMSVYAVYARTDNLSSYNEAFFTSGFICISGLCLAVLSHIFCA |
| | | | | RYSMFAAKLLTHMMAASLGTQILFLASAYASPQLAEESCSAMAAVTHYLYLCQ |
| | | | | FSWMLIQSVNFWYVLVMNDEHTERRYLLFFLLSWGLPAFVVILLIVILKGIYH |
| | | | | QSMSQIYGLIHGDLCFIPNVYAALFTAALVPLTCLVVVFVVFIHAYQVKPQWK |
| | | | | AYADDVFGRTNAAEIPLILYLFALISVTWLWGGLHMAYRHFWMLVLFVIFNSL |
| | | | | QLL\YPLFYFLLL*PQSSSASPGGVDYILHGSTVTFQHGQNLSFINISIIDDN |
| | | | | ESEFEEPIEILLTGATGGAVLGRHLVSRIIIAKSDSPFGVIRFLNQSKISIAN |
| | | | | PNSTMILSLVLERTGGLLGEIQVNWETVGPNSQEALLPQNRDIADPVSGLFYF |
| | | | | GEGEGGVRTIILTIYPHEEIEVEETFIIKLHLVKGEAKLDSRAKDVTLTIQEF |
| | | | | GDPNGVVQFAPETLSKKTYSEPLALEGPLLITFFVRRVKGTFGEIMVYWELSS |
| | | | | EFDITEDFLSTSGFFTIADGESEASFDVHLLPDEVPEIEEDYVIQLVSVEGGA |
| | | | | ELDLEKSITWFSVYANDDPHGVFALYSDRQSILIGQNLIRSIQINITRLAGTF |
| | | | | GDVAVGLRISSDHKEQPIVTENAERQLVVKDGATYKVDVVPIKNQVFLSIGSN |
| | | | | FTLQLVTVMLVGGRFYGMPTILQEAKSAVLPVSEKAANSQVGFESTAFQLMNI |
| | | | | TAGTSHVMISRRGTYGALSVAWTTGYAPGLEIPEFIVVGNMTPTLGSLSFSHG |
| | | | | EQRKGVFLWTFPSPGWPEAFVLHLSGVQSSAPGGAQLRSGFIVAEIEPMGVPQ |
| | | | | FSTSSRNIIVSEDTQMIRLHVQRLEGFHSDLIKVSYQTTAGSAKPLEDFEPVQ |
| | | | | NGELFFQKFQTEVDFEITIINDQLSEIEEFFYINLTSVEIRGLQKFDVNWSPR |
| | | | | LNLDFSVAVITILDNDDLAGMDISFPETTVAVAVDTTLIPVETESTTYLSTSK |
| | | | | TTTILQPTNVVAIVTEATGVSAIPEKLVTLHGTPAVSEKPDVATVTANVSIHG |
| | | | | TFSLGPSIVYIEEEMKNGTFNTAEVLIRRTGGFTGNVSITVKTFGERCAQMEP |
| | | | | NALPFRGIYGISNLTWAVEEEDFEEQTLTLIFLDGERERKVSVQILDDDEPEG |
| | | | | QEFFYVFLTNPQGGAQIVEGKDDTGFAAFAMVIITGSDLHNGIIGFSEESQSG |
| | | | | LELREGAVMRRLHLIVTRQPNRAFEDVKVFWRVTLNKTVVVLQKDGVNLMEEL |
| | | | | QSVSGTTTCTMGQTKCFISIELKPEKVPQVEVYFFVELYEATAGAAINNSARF |
| | | | | AQIKILESDESQSLVYFSVGSRLAVAHKKATLISLQVARDSGTGLMMSVNFST |
| | | | | QELRSAETIGRTIISPAISGKDFVITEGTLVFEPGQRSTVLDVILTPETGSLN |
| | | | | SFPKRFQIVLFDPKGGARIDKVYGTANITLVSDADSQAIWGLADQLHQPVNDD |
| | | | | ILNRVLHTISMKVATENTDEQLSAMMHLIEKITTEGKIQAFSVASRTLFYEIL |
| | | | | CSLINPKRKDTRGFSHFAELTENFAFSLLTNVTCGSPGEKSKTILDSCPYLST |
| | | | | LALHWYPQQINGHKFEGKEGDYIRIPERLLDVQDAEIMAGKSTCKLVQFTEYS |
| | | | | SQQWFISGNNLPTLKNKVLSLSVKGQSSQLLTNDNEVLYRIYAAEPRIIPQTS |
| | | | | LCLLWNQAAASWLSDSQFCKVIEETADYVECACLHMSVYAVYARTDNLSSYNE |
| | | | | AFFTSGFICISGLCLAVLSHIFCARYSMFAAKLTHMMAASLGTQILFLAASAY |
| | | | | ASPQLAEESCSAMAAVTHYLYLCQFSWMLIQSVNFWYVLVMNDEHTERRYLLP |
| | | | | FLLSWGLPAFVVILLIVILKGIYHQSMSQIYGLIHGDLCFIPNVYAALFTAAL |
| | | | | VPLTCLVVVFVVFIHAYQVKPQWKAYDDVFRGRTNAAEIPLILYLFALISVTW |
| | | | | LWGGLHMAYRHFWMLVLFVIFNSLQLLVPSVLLFTSMRSTFFSFHTGTLTSRE |
| | | | | KKSTFVLTCLLSPDSKGLGVLCVLNTEWAFQVH |
| 363 | 1102 | 2 | 2855 | AAGATMERDGCAGGGSRGGEGGRAPREGPAGNGRDRGRSHAAE |
| | | | | APGDPQAAASLLAPMDVGEEPLEKAARARTAKDPNTYKVLSLV |
| | | | | LSVCVLTTILGCIFGLKPSCAKEVKSCKGRCFERTFG\NCRCD |
| | | | | AACVELG\NCCLGLPGGTCI\EP\EHIW\TCNKFRCG\EKRLT |
| | | | | RSLCACSDDCKD\RGDCLPSNLQFLCVQGE\KSWGRKNPCESH |
| | | | | LMEP\QCP\AGFETPSLPLLIF/SLDGFRAEYLHTWGGLLPVI |
| | | | | SKLKKCGTYTKNMRPVYPTKTFPNHYSIVTGLYPESHGIINNK |
| | | | | MYDPKMNASFSLKSKEKFNPEWYKGEPIWVTAKYQGLKSGTFF |
| | | | | WPGSDVEINGIFPDIYKMYNGSVPFEERILAVLQWLQLPKDER |
| | | | | PHFYTLYLEEPDSSGHSYGPVSSEVIKALQRVDGMVGMLMDGL |
| | | | | KELNLHRCLNLILISDHGMEQGSCKKYIYLNKYLGDVKNIKVI |
| | | | | YGPAARLRPSDVPDKYYSFNYEGIARNLSCREPNQHFKPYLKH |
| | | | | FLPKRLHFAKSDRIEPLTFYLDPQWQLALNPSERKYCGSGFHG |
| | | | | SDNVFSNMQALFVGYGPGFKHGIEADTFENIEVYNLMCDLLNL |
| | | | | TPAPNNGTHGSLNHLLKNPVYTPKHPKEVHPLVQCPFTRNPRD |
| | | | | NLGCSCNPSILPIEDFQTQFNLTVAEEKIIKHETLPYGRPRVL |
| | | | | QKENTICLLSQHQFMSGYSQDILMPLWTSYTVDRNDSFSTEDF |
| | | | | SNCLYQDFRIPLSPVHKCSFYKNNTKVSYGFLSPPQLNKNSSG |
| | | | | IYSEALLTTNIVPMYQSFQVIWRYFHDTLLRKYAEERNGVNVV |
| | | | | SGPVFDFDYDG\RCDSL\ENLRQKRRVHPVTQENFWIPNSTSF |
| | | | | Y/VVLTSC\KDTSQTPLHC\ENL\DTLGFPFCLHRDWINSETC |
| | | | | \VHG\KHDSSW\VEEFVKCLHRA\RITGC*GTSLGLSFYQQRK |
| | | | | EPVSDILKLKTHLPTFSQED |
| 364 | 1103 | 657 | 1 | TVPPPPGGPSPAPLHPKRSPTSTGEAELKEERLPGRKASCSTA |
| | | | | GSGSRGLPPL\SPMVSSAHNPNKAEIPERRKDSTSTPNNLPPS |
| | | | | MMTRRNTYVCTERPGAERPSLLPNGKENSSGTPRVPPASPSSH |
| | | | | SLAPPSGERSRLARGSTIRSTFHGGQVRDRRAGGWGWFFNKHA |
| | | | | LQRAPRNAGAPSLMPGHRTVLINYGGGQDLKNWETCLAAPPNK |
| | | | | HRR |
| 365 | 1104 | 1 | 1313 | HTLHHSSPTSEAEEFVSRLSTQNYFRSLPRGTSNMTYGTFNFL |
| | | | | GGRLMIPNTGISLLIPPDAIPRGKIYEIYLTLHKPEDVRLPLA |
| | | | | GCQTLLSPIVSCGPPG\VLLTRPVILG\MDHCG\EPSPDSW\S |
| | | | | LRLKKQSCEGSWEDVLHLGEEAPSHLYYCQLEASACYVFTEQL |
| | | | | SRYALVGEALSVAAAKRLKLLLFAPVACTSLEYNILVYCLHDT |
| | | | | HDALNVVVQLEKQLQGQLIQEPLVLHFKDSYHNLRLSIHDVPS |
| | | | | SLWKSKLLVSYQEIPFYEIWNGTQRYLHCTFTLERVSPSTSDL |
| | | | | ACKLWVWQVEGDGQSFSINFNITKDTRFAELLALESEAGVPAL |
| | | | | VGPSAFKIPFLIRQKIISSLDPPCRRGADWRTLAQKLHLDSHL |
| | | | | SFFASKPSPTAMILNLWEARHFPNGNLSQLAAAVAGTGPAGRW |
| | | | | LLSQCSEAEC |
| 366 | 1105 | 1 | 343 | GSAAGQVQQQQQRRHQQGKVTVKYDRKELRKRLVLEEWIVEQL |
| | | | | GQLYGCEEEEMPEVEIDIDDLFDAYSDEQRASKLQEALVDCYK |
| | | | | PTEEFIKELLSRIRGMRKLSP\PQKKSV |
| 367 | 1106 | 2 | 1398 | IMLDGRVRWLTPVISALWEAEMEDVIARMQDEKNGIPIRTVKS |
| | | | | FLSKIPSVFSGSDIVQWLIKNLTIEDPVEALHLGTLMAAHGYF |
| | | | | FPISDHVLTLKDDGTFYRFQTPYFWPSNCWEPENTDYAVYLCK |
| | | | | RTMQNKARLELADYEAESLARLQRAFARKWEFIFMQAEAQAKV |
| | | | | DKKRDKIERKILDSQERAFWDVHRPVPGCVNTTEVDIKKSSRM |
| | | | | RNPHKTRKSVYGLQNDIRSHSPTHTPTPETKPPTEDELQQQIK |
| | | | | YWQIQLDRHRLKMSKVADSLLSYTEQYLEYDPFLLPPDPSNPW |
| | | | | LSDDTTFWELEASKEPSQQRVKRWGFGMDEALKDPVGREQFLK |
| | | | | FLESEFSSENLRFWLAVEDLKKRPIKEVPSRVQEIWQEFLAPG |
| | | | | APSAINLDSKSYDKTTQNVKEPGRYTFEDAQEHIYKLMKSDSY |
| | | | | PRFIRSSAYQELLQAKK\KGKSLTSKRLTSIAQSY |
| 368 | 1107 | 1 | 461 | GTRDYPRIVNHLDHTYVTAPQAFMMFQYFVKVVPTVYMKVDGE |
| | | | | VLTTNQIYVTRHEKAAYVLMGDQGLPGVFILYELSPMMVNLTE |
| | | | | IHTFFSLFLTIVGA\TIGGMFFEHFVINYLTHKWGLGFYFKNE |
| | | | | NSLQGGHRTLYGVNFFMYWSLRGGS |
| 369 | 1108 | 2 | 1522 | SVWWNSQRQFVVRAWGCAGPCGRAVFLAFGLGLGLIEEKQAES |
| | | | | RRAVSACQEIQAIFTQKSKKPGPDPLDTRRLQGFRLEEYIGQS |
| | | | | IGKGCSAAVYEATMPTLPQNLEVTKSTGLLPGRGPGTSAPGEG |
| | | | | QERAPGAPAPPLAIKMMWNISAGSSSEAILNTMSQELVPASRV |
| | | | | ALAGEYGAVTYRKSKRGPKQLAPHPNIIRVLRAFTSSVPLLPG |
| | | | | ALVDYPDVLPSRLHPEGLGHGRTLFLVMKNYPCTLRQYLCVNT |
| | | | | PSPRLAAMMLLQLLEGVDHLVQQGIAHRDLKSDNILVELDPDG |
| | | | | CPWKVIADFGCCLADESIGLQLPFSSWYVDRGGNGCLMAPEVS |
| | | | | TARPGPRAVIDYSKADAWAVGAIAYEIFGLVNPFYGQGKAHLE |
| | | | | SRSYQEAQLPALPESVPPDVRQLVRALLQREASKRPSARVAAN |
| | | | | VLHLSLWGEHILALKNLKLDKMVGWLLQQSAATLLANRLTEKC |
| | | | | CVETKMKMLFLANLECETLCQAALKLCSWRR |
| 370 | 1109 | 105 | 1252 | RPLLRLAELPDHCYRMNSSPAGTPSPQPSRANGNINLGPSANP |
| | | | | NAQPTDFDFLKVIGKGNYGKVLLAKRKSDGAFYAVKVLQKKSI |
| | | | | LKKKEQSHIMAERSVLLKNVRHPFLVGLRYSFQTPEKLYFVLD |
| | | | | YVNGGELFFHLQRERRFLEPRARFYAAEVASAIGYLHSLNIIY |
| | | | | RDLKPENILLDCQGHVVLTDFGLCKEGVEPEDTTSTFCGTPEY |
| | | | | LAPEVL\RKEPYDRAVDNWCLGAVLYEMLHGLPPFYSQDVSQM |
| | | | | YENILHQPLQIPGGRTVAACDLLQSLLHKDQRQRLGSKADFLE |
| | | | | IKNHVFFSPINWDDLYHKRLTPPFNPNVTGPADLKHFDPEFTQ |
| | | | | EAVSKSIGCTPDTVASSSGASSAFLGFSYAPEDDDILDC |
| 371 | 1110 | 3 | 1608 | RPQTLKGHQEKIRQRQSILPPPQGPAPIPFQHRGGDSPEAKNR |
| | | | | VGPQVPLSEPGFRRRESQEEPRAVLAQKIEKETQILNCALDDI |
| | | | | EWFARLQKAAEAFKQLNQRRKGKKKGKKARPAEGVKTKRARPP |
| | | | | \SEGEFIDCFQKIKLAINLLAKLQKHIQNPSAAELVHFLFGPL |
| | | | | DLIVNTCSGPDIARSVSCPLLSRDAVDFLRGHLVPKEMSLWES |
| | | | | LGESWMRPRSEWPREPQVPLRVPKFHSGWEPPVDVLQEAPWEV |
| | | | | EGLASAPIEEVSPVSRQSIRNSQKHSPTSEPTPPGDALPPVSS |
| | | | | PHTHRGYQPTPAMAKYVKILYDFTARNANELSVLKDEVLEVLE |
| | | | | DGRQWWKLRSRSGQAGYVPCNILGEAPPEDAGAPFEQAGQKYW |
| | | | | GPASPTHKKPPSFPGNKDELMQHMDEVNDELIRKISNIRAQPQ |
| | | | | PHFRVERSQPVSQPLTYESGPDEVRAWLEAKAFSPRIVENLGI |
| | | | | LTGPQLFSLNKEELKKVCGEEGVRVYSQLTMQKAFLEKQQSGS |
| | | | | ELEELMNKFHSMNQRRGEDS |
| 372 | 1111 | 3 | 1046 | AWHEGLVSSPAIGAYLSASYGDSLVVLVATVVALLDICFILVA |
| | | | | VPESLPEKMRPVSWGAQISWKQADPFASLKKVGKDSTVLL\IC |
| | | | | ITVCLSYLPEAG\QYSSFF\LYLR\QVIGFG\SVKIAAPIAMV |
| | | | | GILSIVAQTAFLSILMRSLGNKNTVLLGLGFQMLQLAWYGFGS |
| | | | | QAWMMWAAGTVAAMSSITFPAISAKVSPNAESDQQGVAQGIIT |
| | | | | GIRGLCNGLGPALYGFIFYMFHVELTELGPKIMSNNVPLQGAV |
| | | | | IPGPPFLFGACIVLMSFLAALFIPEYSKASGVQKHSNSSSGSL |
| | | | | TNTPERGSDEDIEPLKQDSSIWELSSFEEPGNQCTEL*TRQKV |
| | | | | GFCIRHL |
| 373 | 1112 | 1 | 1950 | MAAGIATWLPFARAAAVGWLPLAQQPLPPAPGVKASRGDEVLV |
| | | | | VNVSGRRFETWKNTLDRYPDTILGSSEKEFFYDADSGEYFFDR |
| | | | | DPDMFRINLNFYRTGRIMCPRQECIQAFDEELAPYGLVPELVG |
| | | | | DCCLEEYRDRKKENAERLAEDEEABQAGDGPALPAGSSLRQRL |
| | | | | WRAFENPHTSTAALVFYYVTGFFIAVSVIASVVETIPCRGSAR |
| | | | | RSSREQPCGERFPQAFFCNDTACVLIFTGEYLKRLFAAPSRCR |
| | | | | FLRSVMSLIDVVAILPYYIGLLVPKNDDVSGAFVTLRVFRVFR |
| | | | | IFKFSRHSQGLRILGYTLKSCASELGFLLFSLTMAIIIFATVM |
| | | | | FYAEKGTNKTNFTSIPAAPWYTIVTMTTLGYGDMVPSTIAGKI |
| | | | | FGSICSLSGVLVIALPVPVIVSNFSRIYHQNQRADKRRAQQKV |
| | | | | RLARIRLAKSGTTNAFLQYKQNGGLEDSGSGEEQAVCVRNRSA |
| | | | | FEQQHHHLLHCLEKTTCHEFTDELTFSEALGAVSPGGRTSRST |
| | | | | SVSSQPVGPGSLLSSCCPRRAKRRAIRLANSTASVSRG\SMQE |
| | | | | LDMLAGL\RRSHAP\QSRSSL\NAKPHDSLDLNCDSG\DFVAA |
| | | | | IISIPTPPRNTPDESQPSSPGGGGRAGSTLRNSSLGTPCLFPE |
| | | | | TVKISSL |
| 374 | 1113 | 4 | 664 | GWGKPFKDWTTGGQDTGGEPALLVGAGEGRAPRLNCPSGQIRS |
| | | | | PGPGDLSIYDNWIRYFNRSSPVYGLVP/RSKTSARIYPTYHTA |
| | | | | FDTFDYVDKFLDPGEEGDKGHPETRTGEAED*ALALSPCRR\F |
| | | | | SSHQAVARTAGSVILRLSDSFFLPLKVSDYSETKRSFLQAAQQ |
| | | | | DLGALKEQHSISLGPLVTAVEKFEAEAAALGQRISTLQKGSPD |
| | | | | PLQVRML |
| 375 | 1114 | 1 | 1147 | GIRGGGSLASGGPGPGHASLSQRLRLYLADSWNQCDLVALTCF |
| | | | | LLGVGCRLTPGLYHLGRTVLCIDFMVFTVRLLHIFTVNKQLGP |
| | | | | KIVIVSKMMKDVFFFLFFLGVWLVAYGVATEGLLRPRDSDFPS |
| | | | | ILRRVFYRPYLQIFGQIPQEDMDVALMEHSNCSSEPGFWAHPP |
| | | | | GAQAGTCVSQYANWLVVLLLVIFLLVANILLVNLLIAMFSYTF |
| | | | | GKVQGNSDLYWAQRYRLIREFHSRPALAPPFIVISRLRIRLLR |
| | | | | QLCRRPRSPQPSSPALEHFRVYLSKEAERKLLTWESVHKENFL |
| | | | | LARARDKRESDSERLKRTSQKVDLALKQLGHIREYEQRLKVLE |
| | | | | REVQQCSRVLGWVAEALSRSALLPPGGPPPPDLPGSR |
| 376 | 1115 | 3 | 329 | LIKLCKSKAKSCENDLEMGMLNSKFKKTRYQAGMRNSENLTAN |
| | | | | NTLSKPTRY/QGELKEIKQDISSLRYELLEEKSQATGELADLI |
| | | | | QQLSEKFGKNLNKDHLRVNKGKDI |
| 377 | 1116 | 1 | 2043 | LPLLHAGFNRRFMENSSIIACYNELIQIEHGEVRSQFKLRACN |
| | | | | SVFTALDHCHEAIEITSDDHVIQYVNPAFERMMGYHKGELLGK |
| | | | | ELADLPKSDKNRADLLDTINTCIKKGKEWQGVYYARRKSGDSI |
| | | | | QQHVKITPVIGQGGKIRHFVSLKKLCCTTDNNKQIHKIHRDSG |
| | | | | DNSQTEPHSFRYKNRRKESIDVKSISSRGSDAPSLQNRRYPSM |
| | | | | ARIHSMTIEAPITKVINIINAAQENSPVTVAEALDRVLEILRT |
| | | | | TELYSPQLGTKDEDPHTSDLVGGLMTDGLRRLSGNEYVFTKNV |
| | | | | HQSHSHLAMPITINDVPPCISQLLDNEESWDFNIFELEAITHK |
| | | | | RPLVYLGLKVFSRFGVCEFLNCSETTLRAWFQVIEANYHSSNA |
| | | | | YHNSTHAADVLHATAFFLGKERVKGSLDQLDEVAALIAATVHD |
| | | | | VDHPGRTNSFL\CNAGSELAVLYNDT\AV\LESHHTALAFQ\L |
| | | | | TVKDTK\CNIFKNID/RGNHYRTLRQAIIDMVLATEMTKHFEH |
| | | | | VNKFVNSINKPMAAEIEGSDCECNPAGKNFPENQILIKRMMIK |
| | | | | CADVANPCRPLDLCIEWAGRISEEYFAQTDEEKRQGLPVVMPV |
| | | | | FDRNTCSIPKSQISFIDYFITDMFDAWDAFAHLPALMQHLADN |
| | | | | YKHWKTLDDLKCKSLRLPSDRLKPSHRGGLLTDKGHCESQ |
| 378 | 1117 | 1 | 3585 | AFLSKVEEDDYPSEELLEDENAINAXRSKEKNPGNQGRQFDVN |
| | | | | LQVPDRAVLGTIHPDPEIEESKQETSMILDSEKTSETAAKGVN |
| | | | | TGGREPNTMVEKERPLADKKAQRPFERSDFSDSIKIQTPELGE |
| | | | | VFQNKDSDYLKNDNPEEHLKTSGLAGEPEGELSKEDHENTEKY |
| | | | | MGTESQGSAAAEPEDDSFHWTPHTSVEPGHSDKREDLLIISSF |
| | | | | FKEQQSLQRFQKYFNVHELEALLQEMSSKIKSAQQESLPYNME |
| | | | | KVLDKVFRASESQILSIAEKMLDTRVAENRDLGMNENNIFEEA |
| | | | | AVLDDIQDLIYFVRYKHSTAEETATLVMAPPLEEGLGGAMEEM |
| | | | | QPLHEDNFSREKTAELNVQVPEEPTHLDQRVIGDTHASEVSQK |
| | | | | PNTEKDLDPGPVTTEDTPMDAIDANKQPETAAEEPASVTPLEN |
| | | | | AILLIYSFMFYLTKSLVATLPDDVQPGPDFYGLPWKPVFITAF |
| | | | | LGIASFAIFLWRTVLVVKDRVYQVTEQQISEKKKTIMKENTEL |
| | | | | VQKLSNYEQKIKESKKHVQETRKQNMILSDEAIKYKDKIKTLE |
| | | | | KNQEILDDTAKNLRVMLESEREQNVKNQDLISENKKSIEKLKD |
| | | | | VISMNASEFSEVQIMJNEAXLSEEKVKSECHRVQEENARLKKK |
| | | | | KEQLQQEIEDWSKHAELSEQIKSFEKSQKDLEVAIRTHKDDNI |
| | | | | NALTNCITQLNLLECESESEGQNKGGNDSDELANGEVGGDRNE |
| | | | | KMKNQIKQMMDVSRTQTAISVVEEDLKLLQLKL\RASVSTKC\ |
| | | | | NLEDQVKKLEDDRNSLQAAKAGLEDECKTLRQKVEILNELYQQ |
| | | | | KEMALQKKLSQEEYERQEREHRLSAADEKAVSAAEEVKTYKRR |
| | | | | IEEMEDELQKTERSFKNQIATHEKKAHENWLKARAAERAIAEE |
| | | | | KREAANLRHKLLDLTQKMAMLQEEPVIVKPMPGKPNTQNPPRP |
| | | | | GPLSQNGSFGPSPVSGGECSPPLTVEPPVRPLSATLNRRDMPR |
| | | | | SEFGSLDGPLPHPRWSAEASGKPSPSDPGSGTATMMNSSSRGS |
| | | | | SPTRVLDEGKVNMAPKGPPPFPGVPLMSTPMGGPVPPPIRYGP |
| | | | | PPQLCGPFGPRPLPPPFGPGMRPPLGLREFAPGVPPGRRDLPL |
| | | | | HPRGFLPGHAPFRPLGSLGPREYFIPGTRLPPPTHGPQEYPPP |
| | | | | PAVRDLLPSGSRDEPPPASQSTSQDCSQAIRKQSP |
| 379 | 1118 | 3 | 2946 | MAADSEPESEVFEITDFTTASEWERFISKVEEVLNDWKLIGNS |
| | | | | LGKPLEKGIFTSGTWEEKSDEISFADFKFSVTHHYLVQESTDK |
| | | | | EGKDELLEDVVPQSMQDLLGMNNDFPPRAHCLVRWYGLREFVV |
| | | | | IAPAAHSDAVLSESKCNLLLSSVSIALGNTGCQVPLFVQIHHK |
| | | | | WRRMYVGECQRPGVRTDFENVHLRKVPNQYTHLSGLLDIFKSK |
| | | | | IGCPLTPLPPVSIAIRPTYVLQDWQQYFWPQQPPDIDALVGGE |
| | | | | VGGLEFGKLPFGACEDPISELHLATTW\PHLTEGIIVDNDVYS |
| | | | | DLDPIQAPHWSVRVRKAENPQCLLGDFVTEFFKICRRKESTDE |
| | | | | ILGRSAFEEEGKETADITHALSKLTEPASVPIHKLSVSNMVHT |
| | | | | AKKKIRKHRRVRESPLNNDVLNTILLFLFPDAVSEKPLDGTTS |
| | | | | TDNNNPPSESEDYNLYNQFKSAPSDSLTYKLALCLCMINFYHG |
| | | | | GLKGVAHLWQEFVLEMRFRWENNFLIPGLASGPPDLRCCLLHQ |
| | | | | KLQMLNCCIERKKARDEGKKTSASDVTNIYPGDAGKAGDQLVP |
| | | | | DNLKETDKEKGEVGKSWDSWSDSEEEFFECLSDTEEIKGNGQE |
| | | | | SGKKGGPKEMANLRPEGRLYQHGKLTLLHNGEPLYIPVTQEPA |
| | | | | PMTEDLLEEQSEVLAKLGTSAEGAHLRARMQSACLLSDMESFK |
| | | | | AANPGCSLEDFVRWYSPRDYIEEEVIDEKGNVVLKGELSARMK |
| | | | | IPSNMWVEAWETAKPIPARRQRRLFDDTREAEKVLHYLAIQKP |
| | | | | RDLARHLLPCVIHAAVLKVKEEESLENISSVCKIIKQIISHSS |
| | | | | KVLHFPNPEDKKLEEIIHQITNVEALIARARSLKAKFGTEKCE |
| | | | | QEEEKEDLERFVSCKLEQPEVLVTGAGRGHAGRIIHKKFVNAQ |
| | | | | RAAAMTPPEEELKRMGSPEERRQNSVSDFPPPAGREFILRTTV |
| | | | | PRPAPYSKALPQRMYSVLTKEDFRLAGAFSSDTSFF |
| 380 | 1119 | 2333 | 670 | SPTRTGDRSVSLIVFLTEGKPTVGETHTLKILNNTREAARGQV |
| | | | | CIFTIGIGNDVDFRLIEKLSLENCGLTRRVHEEEDAGSQLIGF |
| | | | | YDEIRTPLLSDIRIDYPPSSVVQATKTLFPNYFNGSEIIIAGK |
| | | | | LVDRKKDHLHVEVTASNSKKFIILKTDVPVRPQKAGKDVTGSP |
| | | | | RPGGDGEGDTNHIERLWSYLTTKELLSSWLQSDDEPEKEPLRQ |
| | | | | PAQALAVSYRFLTPFTSMKLRGPVPRMDGLEEAHGMSAAMGPE |
| | | | | PVVQSVRGAGTQPGPLLKKPYQPRIKISKTSVDGDPHFVVDFP |
| | | | | LSRLTVCFNIDGQPGDILRIVSDHRDSGVTVNGELIGAPAPPN |
| | | | | GHKKQRTYLRTITILINKPERSYLEITPSRVILDGGDRLVLPC |
| | | | | NQSVVVGSWGLEVSVSANANVTVTIQGSIARVILIHLYKKPAP |
| | | | | FQRHHLGFYIRNSEGLSSNCHGLLGQFLNQDARLTEDPAGPSQ |
| | | | | NLTHPLLLQVGEGPEAVLTVKGHQVPVVWKQRKIYNGEEQIDC |
| | | | | WFAPDNAAXIRIDGEYKDYLASHPFDTGMTLGQGMSREL |
| 381 | 1120 | 102 | 426 | VPLESLSCSHADNWKQELTKFISPDQLPVEFGGTMTDPDGNPK |
| | | | | CLTKINYGGEVPKSYYLCKQVRLQYEHTRSVGRGSSLQVENEI |
| | | | | LFPGCVLRCPEVLQHLQPGSF |
| 382 | 1121 | 3 | 3726 | PAAPEHTDPSEPRGSVSCCSLLRGLSSGWSSPLLPAPVCNPNK |
| | | | | AIFTVDAKTTEILVANDKACGLLGYSSQDLIGQKLTQFFLRSD |
| | | | | SDVVEALSEEHMEADGHAAVVFGTVVDIISRSGEKIPVSVWMK |
| | | | | RIRQERRLCCVVVLEPVERVSTWVAFQSDGTVTSCDSLFAHLH |
| | | | | GYVSGEDVAGQHITDLIPSVQLPPSGQHIPKNLKIQRSVGRAR |
| | | | | DGTTFPLSLKKKSQPSSEEATTGEAAPVSGYRASVWVFCTISG |
| | | | | LITLLPDGTIHGINHSFALTLFGYGKTELLGKNITFLIPGFYS |
| | | | | YMDLAYNSSLQLPDLASCLDVGNESGCGERTLDPWQGQDPAEG |
| | | | | GQDPRINVVLAGGHVVPRDEIRKLMESQDIFTGTQTELIAGGQ |
| | | | | LLSCLSPQPAPGVDNVPEGSLPVHGEQALPKDQQITALGREEP |
| | | | | VAIESPGQDLLGESRSEPVDVKPFASCEDSEAPVPAEDGGSDA |
| | | | | GMCGLCQKAQLERMGVSGPSGSDLWAGAAVAKPQAKGQLAGGS |
| | | | | LLMHCPCYGSEWGLWWRSQDLAPSPSGMAGLSFGTPTLDEPWL |
| | | | | GVENDREELQTCLIKEQISQLSLAGALDVPHAELVPTECQAVT |
| | | | | APVSSCDLGGRDLCGGCTGSSSACYALATDLPGGLEAVEAQEV |
| | | | | DVNSFSWNLKELFFSDQTDQTSSNCSCATSELRETPSSLAVGS |
| | | | | DPDVGSLQEQGSCVLDDRELLLLTGTCVDLGQGRRFRESCVGH |
| | | | | DPTEPLEVCLVSSEHYAASDRESPGHVPSTLDAGPEDTCPSAE |
| | | | | EPRLNVQVTSTPVIVMRGAAGLQREIQEGAYSGSCYHRDGLRL |
| | | | | SIQFEVRRVELQGPTPLFCCWLVKDLLHSQRDSAARTRKFLAS |
| | | | | LPGSTHSTAAELTGPSLVEVLRARPWFEEPPKAVELEGLAACE |
| | | | | GEYSQKYSTMSPLGSGAFGFVWTAVDKEKNKEVVVKFIKKEKV |
| | | | | LEDCWIEDPKKGKVTLEIAILSRVEHANIIKVLDIFENQGFFQ |
| | | | | LVMEKHGSGLDLFAFIDRHPRKDEPLASYIFRQVRAG\QSRKV |
| | | | | SAVGYLRLKDIIHRDIKDENIVIAEDFTIKKIDFGSAAYLERG |
| | | | | KKFYTFCGTIEYCAPEVLMGNPYRGPELEMWSLGVTLYTLVFE |
| | | | | ENPFCELEETVEAAIHPPYLVSKEKMSLVSGLLQPVPERRTTL |
| | | | | EKLVTDPWVTQPVNLADYTWEEVFRVNKPESGVLSAASLEMGN |
| | | | | RSLSDVAQAQELCGGPVPGEAPNGQGCLHPGDPRLLTS |
| 383 | 1122 | 177 | 1365 | PGTSAATCRFLSPPVISLSFTGLCISDLVVAVNGVWILVETFM |
| | | | | LKGGNFFSKHVPWSYLVFLTIYGVELFLKVAGLGPVEYLSSGW |
| | | | | NLFDFSVTVFAFLGLLALAKNMEPFYFIVVLRPLQLLRKFKLK |
| | | | | ERYRNVLDTMFELLPRMASLGLTLLIFYYSPAIVGMEFFCGIV |
| | | | | FPNCCNTSTVADAYRWRNHTVGNRTVVEEGYYYLNNFDNILNS |
| | | | | FVTLFELTVVNNWYIIMEGVTSQTSHWSRLYFMTFYIVTMVRM |
| | | | | TIIVAFILHAFVFRNNYSRKNQDSEVDGGITLEKEISKEELVA |
| | | | | VLELYREARGASSDVTRLLETLSQMERYQQHSMVFLGRRSRTK |
| | | | | SDLSLKMYQEEIQEWYEEHAREQEQQRQLSSSAAPAAQQPPGS |
| | | | | RQRSQTVT |
| 384 | 1123 | 1 | 986 | LAGVGTQAPPRRPGGEMAAGQNGHEEWVGSAYLFVESSLDKVV |
| | | | | LSDAYAHPQQKVAVYRALQAALAESGGSPDVLQMLKIHRSDPQ |
| | | | | LIVQLRFCGRQPCGRFLRAYREGALRAALQRSLAAALAQHSVP |
| | | | | LQL\DLRAGAERLEALLADEERCLSCILAQQPDRLRDEELAEL |
| | | | | EDAKRNLKCGSGARGGDGEVASAPLQPPVPSLSEVKPPPPPPP |
| | | | | AQTFLFQGQPVVNRPLSLKDQQTFARSVGLKWRKVGRSLQRGC |
| | | | | RAKRDPALDSLAYEYEREGLYEQAFQLLRRFVQAEGRRATLQR |
| | | | | LVEALEENELTSLAEDLLGLTDPNGGLA |
| 385 | 1124 | 2409 | 399 | SSKPKLKKRFSLRSVGRSVRGSVRGILQWRGTVDPPSSAGPLE |
| | | | | TSSGPPVLGGNSNSNSSGGAGTVGRGLVSDGTSPGERWTHRFE |
| | | | | RLRLSRGGGALKDGAGMVQREELLSFMGAEEAAPDPAGVGRGG |
| | | | | GVAGPPSGGGGQPQWQKCRLLLRSEGEGGGGSRLEFFVPPKAS |
| | | | | RPRLSIPCSSITDVRTTTALEMPDRENTFVVKVEGPSEYIMET |
| | | | | VDAQHVKAWVSDIQECLSPGPCPATSPRPMTLPLAPGTSFLTR |
| | | | | ENTDSLELSCKNHSESLPSQDLLLGPSESNDRLSQGAYGGLSD |
| | | | | RPSASISPSSASIAASHFDSMELLPPELPPRIPIEEGPPAGTV |
| | | | | HPLSAPYPPLNTPETATGSFLFQG\EPEGGEGDQPLSGYPWFH |
| | | | | GMLSRLKAAQLVLTGGTGSHGVFLVRQSETRPGEYVLTFNFQG |
| | | | | KAKHLRLSLNEEGQCRVQHLWFQSIFDMLEHFRVHPIPLESGG |
| | | | | SSDVVLVSYVPSSQRQQGEQSRSAGEEVPVHPRSEAGSRLGAM |
| | | | | RGCAREMDATPNASCTLMPFGASDC\EPTTSHDPPQPPEPPSW |
| | | | | TDPPQPGEE\EASR\APGSGGQQAAAAAKERQEKEKAGG\GGV |
| | | | | PEE\LVPVV*LVPVGELGEGHRPQAQEAQGRLGPGGDAGVPP\ |
| | | | | MVQLQQSPLGG\DGEEGGHPR\AI\NNQYSFV |
| 386 | 1125 | 2204 | 1042 | FRAPVGTAARSPQVVIRRLPPGLTKEQLEEQLRPLPAHDYFEF |
| | | | | FAADLSLYPHLYSRAYINFRNPDDILLFRDRFDGYIFKDSKDP |
| | | | | EYKKFLETYCVEEEKTSANPETLLGEMEAKTRELIARRTTPLL |
| | | | | EYIKNRLKLEKQRIREEKRERRRRELEKKRLREEEKRRRREEE |
| | | | | RCKKKETDKQKKIAEKEVRIKLLKKPEKGEEPTTEKPKERGEE |
| | | | | IDTGGGKQESCAPGAVVKARPMEGSLEEPQETSISGSDKEHRD |
| | | | | VERSQEQESEAQRYHVDDGRRHRAHHEPERLSRRSEDEQRWGK |
| | | | | GPGQDRGKKGSQDSGAPGEAMERLGRAQRCDDSPAPRKERLAN |
| | | | | KDRPALQLYDPGARFRARECGGNRRICKAEGSGTGPEKREEAE |
| 387 | 1126 | 176 | 800 | GVWGVCVSGLLQVGSQRAQAWRAWSPMETPLTGTFLWPHIPQG |
| | | | | LFFDDSYGFYPGQVLIGPAKIFSSVQWLSGVKPVLSTKSKFRV |
| | | | | VVEEVQVVELKVTWITKSFCPGGTDSVSPP/PSVITQENLGRV |
| | | | | KRLGCFDHAQR/HAWGALSVCLPSQGRASQDCLGMSRKKIRPG |
| | | | | GGLYGQEGEAPVEEAGCADHVMLPRHPVFPGPFHGRPR |
| 388 | 1127 | 1 | 2017 | FRDSSPCSAFEFHCLSGECIHSSWRCDGGPDCKDKSDEENCAV |
| | | | | ATCRPDEFQCSDGNCIHGSRQCDREYDCKDMSDEVGCVNVTLC |
| | | | | EGPNKFKCHSGECITLDKVCNMARnCRDWSDEPIKECGTNECL |
| | | | | DNNGGCSHVCNDLKIGYECLCPDGFQLVAQRRCEDIDECQDPD |
| | | | | TCSQLCVNLEGGYKCQCEEGFQLDPHTKACKAVGSIAYLFFTN |
| | | | | RHEVRKMTLDRSEYTSLIPNLRNVVALDTEVASNRIYWSDLSQ |
| | | | | RMICSTQLDRAHGVSSYDTVISRDIQAPDGLAVDWIHSNIYWT |
| | | | | DSVLGTVSVADTKGVKRKTLFRENGSKPRAIVVDPVHGFMYWT |
| | | | | DWGTPAKIKKGGLNGVDIYSLVTENIQWPNGITLDLISGRLYW |
| | | | | VDSKKHSISSIDVNGGNRKTILEDEKRLAHPFSLAVFEDKVFW |
| | | | | TDIINEAIFSANRKTGSDVNLLAENLLSPEDMVLFHNLTQPRG |
| | | | | VNWCERTTLSNGGCQYLCLPAPQINPHSPKFTCACPDGMLLAR |
| | | | | DNRSCLTEG\EAAVATQETSTVRLKVSSTAVRTQHTTTRPVPD |
| | | | | TSRLPGATPGLTRREIVTMSHQALGDVAG\PGN\EKKPSSVRA |
| | | | | LSIVLPIV\LLVFLCLGVFLLWKNWRLKNINSINFDNPVYQKT |
| | | | | TEDEVHKHNQDGYSYPSRQMVSLEDDVA |
| 389 | 1128 | 2299 | 1148 | RIPGLGPPGSPPPPPHVRGMPGCPCPGCGMAGPRLLFLTALAL |
| | | | | ELLGRAGGSQPALRSRGTATACRLDNKESESWGALLSGERLDT |
| | | | | WICSLLGSLMVGLSGVFPLLVIPLEMGTMKRSEAGAWRLKQLL |
| | | | | SFALGRLLGNVFLHLLPEAWAYTCSASPGGEGQSLQQQQQLGL |
| | | | | WVIAGILTFLALEKMFLDSKEEGTSQAPNKDPTAAAAAINGGH |
| | | | | CLAQPAAEPGLGAVVRSIKVSGYLNLLANTIDNFTHGLAVAAS |
| | | | | FLVSKKIGLLTTMAILLHEIPHEVGDFAILLRAGFDRWSAAKL |
| | | | | QLSTALGGLLGAGFAICTQSPKGVEETAAWVLPFTSGGFLYIA |
| | | | | LVNVLPDLKEEEDPWRSLQQLLLLCAGIVVMVLFSLFVD |
| 390 | 1129 | 1 | 523 | GKVSAGQAGADRTLRPAPEPRFSQEPTGNSAYPQLRPFLDPQG |
| | | | | RDLKPSALVPPTRSHTGRRPWLHTQPLPGPQGRAWGPTC/TPA |
| | | | | CVDRVLESEEGRREYLAFPTSKSSGQKGRKELLKGNGRRIDYM |
| | | | | LHAEEGLCPDWKAEVEEFSFITQLSGLTDHLPVANRLMVSSGE |
| | | | | EEA |
| 391 | 1130 | 1459 | 765 | PCGGLLSASEAATLFGYLVVPAGGGGTFLGGFFVNKLRL*RGS |
| | | | | AVIKFCLFCTVVSLLGILVFSLHCPSVPMAGVTASYGGSLLPE |
| | | | | GHLNLTAPCNAACSCQPEHYSPVCGSDGLMYFSLCHAGCPAAT |
| | | | | ETNVDGQKVSGAAAYRPCPPLDPGKGPPCLPLVIGAIVGLPRC |
| | | | | TETVAVSLRIFPLVLAM\HCREMHFNLSEKAPPSGFHIRCNFL |
| | | | | YIPQQHSCTNGNSTMCP |
| 392 | 1131 | 1668 | 962 | LLRKVGAPGGARGVIRLLDWFERPDGFLLVLERPEPA\QD\LF |
| | | | | DFITERGALDEPLARRF\FAQVLAAVRHCHSCGVVHRDIKDEN |
| | | | | LLVDLRSGELKLIDFGSGALLKDTVYTDFDGTRVYSPPEWIRY |
| | | | | HRYHGRSATVWSLGVLLYDMVCGDIPFEQDEEILRGRILFRRR |
| | | | | VSPECQQLIRWCLSLRPSERPSLDQIAAHPWMLGADGGAPESC |
| | | | | DLRLCTLDPDDVASTTSSSESL |
| 393 | 1132 | 3 | 817 | GKNSQKASPVDDEQLSVCLSGFLDEVMKKYGSLVPLSEKEVLG |
| | | | | RLKDVFNEDFSNRKPFINREITNYRARHQKCNFRIFYNKHMLD |
| | | | | MDDLATLDGQNWLNDQVINMYGELIMDAVPDKVHFFNSFFHRQ |
| | | | | LVTKGYNGVKRWTKKVDLFKKSLLLIPIHLEVHWSLITVTLSN |
| | | | | RIISFYDSQGIHFKFCVENIRKYLLTEAREKNR\LNLQGWQTA |
| | | | | VTKCIPQQKNDSDCGVFVLQYCKCLAL\KQPFQFSQEDMPRVR |
| | | | | KRIYKELCECRLMD |
| 394 | 1133 | 1252 | 628 | PPGG*QGSAAKHR/FP/KGYRHPALEARLGRRRTVQEARALLR |
| | | | | CRRAGISAPVVFFVDYASNCLYMEEIEGSVTVRDYIQSTMETE |
| | | | | K\TPQGLSNLAKTIGQVLARMHDEDLIHGDLTTSNMLLKPPLE |
| | | | | QLNIVLIDFGLSFISALPEDKGVDLYVLEKAFLSTHPNTETVF |
| | | | | EAFLKSYSTSSKKARPVLKKLDEVRLRGKKRSMVG |
| 395 | 1134 | 2 | 1595 | RACVFRPEDMMQGEAHPSASLIDRTIKMRKETEARKVVLAWGL |
| | | | | LNVSMAGMIYTEMTGKLISSYYNVTYWPLWYIELALASLFSLN |
| | | | | ALFDFWRYFKYTVAPTSLVVSPGQQTLLGLKTAVVQTTPPHDL |
| | | | | AATQIPPAPPSPSIQGQSVLSYSPSRSPSTSPKFTTSCMTGYS |
| | | | | PQLQGLSSGGSGSYSPGVTYSPVSGYNKLASFSPSPPSPYPTT |
| | | | | VGPVESSGLRSRYRSSPTVYNSPTDKEDYMTDLRTLDTFLRSE |
| | | | | EEKQHRVKLGSPDSTSPSSSPTFWNYSRSMGDYAQTLKKFQYQ |
| | | | | LACRSQAPCANKDEADLSSKQAAEEVWARVAMNRQLLDHMDSW |
| | | | | TAKFRNWINETILVPLVQEIESVSTQMRRMGCPELQIGEASIT |
| | | | | SLKQAALVKAPLIPTLNTIVQYLDLTPNQEYLFERIKELSQGG |
| | | | | CMSSFRWNFRGGDFKGRKWDTDLPTDSAIIMHVFCTYLSRLPP |
| | | | | HPKYPDGKTFTSQHFVQTPNKPDVTNENVFCIYQSAINPPHYE |
| | | | | LIYQRHVYIPAKGQK |
| 396 | 1135 | 16 | 1542 | SSAVEFINRNNSVVQVLLAAGADPNLGDDFSSVYKTAKEQGIH |
| | | | | SLEVLITREDDFNNRLNNRASFKGCTALHYAVLADDYRTVKEL |
| | | | | LDGGANPLQRNEMGHTPLDYAREGEVMKLLRTSEAKYQEKQRK |
| | | | | REAEERRRFPLEQRLKEHIIGQESAIATVGAAIRRKENGWYDE |
| | | | | EHPLVFLFLGSSGIGKTELAKQTAKYMHKDAKKGFIRLDMSEF |
| | | | | QERHEVAKFIGSPPGYVGHEEGGQLTKKLKQCPNAVVLFDEVD |
| | | | | KAHPDVLTIMLQLFDEGRLTDGKGKTIDCKDAIFIMTSNVASD |
| | | | | EIAQHALQLRQEALEMSRNRIAENLGDVQISDKITISKNFKEN |
| | | | | VIRPILKAHFRRDEFLGRINEIVYFLPFCHSELIQLVNKELNF |
| | | | | WAKRAKQRHNITLLWDREVADVLVDGYNVHYGARSIKHEVERR |
| | | | | VGNQLAAAYEQDLLP\GGCTLRITVEDSDKQLLKSPELPSPQA |
| | | | | EKRLPKLRLEIIDKDSKTRRLDLAPLHPEKVCNTI |
| 397 | 1136 | 1848 | 1602 | SSCDRERHGSLGMMSGSFILCLALVTRWSPQASSVPLAVYESK |
| | | | | TRKSYRSQRDRDGKDRSQGMGLSLLVETRKLLLSANQG |
| 398 | 1137 | 1497 | 717 | HTPMA/FFL/SFLSTSET/VYTFVILPKL4LINLLSVRTISFN |
| | | | | CCALQMFFFLGFAITNCLLLGVMGYDRYAAICHPLHYPTLMSW |
| | | | | QVCGKLAAACAIGGFLASLTVVNLVFSLPFCSTNKVNHYFCDI |
| | | | | SAVILLACTNTDVNGFVIFICGVLVLVVPFLFICVSYFCILRT |
| | | | | ILKIPSAEGRRKAFSTCASHLSVVIVHYGCASFIYLRPTANYV |
| | | | | SNKDRLVTVTYTIVTPLLNPMVYSLRNKDVQLAIRKVLGKKGS |
| | | | | LKLYN |
| 399 | 1138 | 2 | 1185 | RPPAATRYPREKLKSMTSRDNYKAGSREAA\AAAAAAVAAAAA |
| | | | | AAAAAEPYPVSGAKRKYLEDSDPERSDYEEQQLQEEEEARKRR |
| | | | | SGIRQMRLFSQDECAKIEARIDEVVSRAEKGLYNEHTVDRAPL |
| | | | | RNKYFFGEGYTYGAQLQKRGPGQERLYPPGDVDEIPERRMQLV |
| | | | | IQKLVEHRVIPEGFVNSAVINDYQPGGCIVSHVDPIHIFERPI |
| | | | | VSVSFFSDSALCFGCKFQFKPIRVSEPVLSLPVRRGSVTVLSG |
| | | | | YAADEITHCIRPQDIKERRAVIILRKTRLDAPRLETKSLSSSV |
| | | | | LPPSYASDRLSGNNRDPALKPKRSHRKADPDAAHRPRILEMDK |
| | | | | EENRRSVLLPTHRRRGSFSSENYWRKSYESSEDCSEAAGSPAR |
| | | | | KVKMRRH |
| 400 | 1139 | 60 | 1699 | VTWHFYFCSDHKNGHYIIPQMADRSRQKCMSQSLDLSELAKAA |
| | | | | KKKLQALSNRLFEELAMDVYDEVDRRENDAVWLATQNHSTLVT |
| | | | | ERSAVPFLPVNPEYSATRNQGRQKLARFNAREFATLIIDILSE |
| | | | | AKRRQQGKSLSSPTDNLELSLRSQSDLDDQHDYDSVASDEDTD |
| | | | | QEPLRSTGATRSNRARSMDSSDLSDGAVT\LQEYLELKKALAT |
| | | | | SEAKVQQLMKVNSSLSDEL\RRLQREHFAPI\IHKLQAENLQL |
| | | | | RQPPGPVPTPPLPSERAEHTPMAPGGSTHRRDRQAFSMYEPGS |
| | | | | ALKPFGGPPGDELTTRLQPFHSTELEDDAIYSVHVPAGLYRIR |
| | | | | KGVSASAVPFTPSSPLLSCSQEGSRHTSKLSRHGSGADSDYEN |
| | | | | TQSGDPLLGLEGKRFLELGKEEDFHPELESLDGDLDPGLPSTE |
| | | | | DVILKTEQVTKNIQELLRAAQEFKHDSFVPCSEKIHLAVTEMA |
| | | | | SLFPKRPALEPVRSSLRLLNASAYRLQSECRKTVPPEPGAPVD |
| | | | | FQLLTQQVIQCAYDIAKARAKQLVTITTPRRQ |
| 401 | 1140 | 1 | 1863 | RYLSYGSGPKRFPLVDVLQYALEFASSKPVCTSPVDDIDASSP |
| | | | | PSGSIPSQTLPSTTEQQGAISSELPSTSPRSVAAISSRSVIHK |
| | | | | PFTQSRIPPDLPMHPAPRHITEEELSVLESCLHRWRTEIENDT |
| | | | | RDLQESISRIHRTIELMYSDKSMIQVPYRLHAVLVHEGQANAG |
| | | | | HYWAYIFDHRESRRRMKYNDIAVTKSSWEELVRDSFGGYRASA |
| | | | | YCLMYINDKAQFLIQEEFN/K/ETGQPLVGIETLPPDLRDFVE |
| | | | | EDNQRFEKELEEWDAQLAQKALQEKLLASQKLRESETSVTTAQ |
| | | | | AAGDPKYLEQPSRSDFSKHLKEETIQIITKASHEHEDKSPETV |
| | | | | LQSAIKLEYARLVKLAQEDTPPETDYRLHHVVVYFIQNQAPKK |
| | | | | IIEKTLLEQFGDRNLSFDERCHNIMKVAQAKLEMIKPEEVNLE |
| | | | | EYEEWHQDYRKFRETTMYLIIGLENFQRESYIDSLLFLICAYQ |
| | | | | NNKELKSFCGLYRGHDELISHYRRECLLKLNEQAAELFESGED |
| | | | | REVNNGLIIMNEFIVPFLPLLLVDEMEEKDILAVEDMRNRWCS |
| | | | | YLGQEMEPHLQEKLTDFLPKLLDCSMEIKSFHEPPKLPSYSTH |
| | | | | ELCERFARIMLSLSRTPADGR |
| 402 | 1241 | 1 | 465 | AQVYVRNDSFDEDLARPSGLLAQERKLCRDLVHSRRBRQEFRS |
| | | | | IFQHIQSAQSQRSPSELFAQHM\VPIVHHVKEHHFGSSGMTLH |
| | | | | ERFT\KYLKRG\TEQEAAKNKKSPEIHRRIDISPSTFRKHGLA |
| | | | | HDEMKSPREPGYKDGKNSRELQRVNFY |
| 403 | 1142 | 2 | 369 | TYTFCFSLMI\ILLTIIQGLILEAFGELRDQLDQVKEDMETKC |
| | | | | FICGIGNDYFDTVPHGFETHTLQEHNLANYLFFLMYLINKDET |
| | | | | EHTGQESYVWKMYQERCWEFFPAGDCFRKQYEDQLN |
| 404 | 1143 | 3115 | 557 | FRRKGGGGPKDFGAGLKYNSRHEKVNGLEEGVEFLPVNRVKKV |
| | | | | EKHGPGRWVVLAAVLIGLLLVLLGIGFLVWHLQYRDVRVQKVF |
| | | | | NGYMRITNENFVDAYENSNSTEFVSLASKVKDALKLLYSGVPP |
| | | | | LGPYHKESAVTAFSEGSVIAYYWSEFSIPQHLVEEAERVMAEE |
| | | | | RVVMLPPRARSLKSFVVTSVVAFPTDSKTVQRTQDNSCSFGLH |
| | | | | ARGVELMRFTTPGFPDSPYPAHARCQWALRGDADSVLSLTFRS |
| | | | | FDLASCDERGRHLV\TVYNT\LSPMEPHA\LVQLCGTYPPSYN |
| | | | | LTFHS\S\QNVLLITLITNTERRHPG\FEATFFQLPRMSSCGG |
| | | | | RLRKAQGTFNSPYYPGHYPPNIDCTWNIEVPNNQHVKVRFKFF |
| | | | | YLLEPGVPAGTCPKDYVEINGEKYCGERSQFVVTSNSNKITVR |
| | | | | FHSDQSYTDTGFLAEYLSYDSSDPCPGQFTCRTGRCIRKELRC |
| | | | | DGWADCTDHSDELNCSCDAGHQFTCKNKFCKPLFWVCDSLNDC |
| | | | | GDNSDEQGCSCP\AQTFRCSNGKCLSKSQQCNGKDDCGDGSDE |
| | | | | ASCPKVNVVTCTKHTYRCLNGLCLSKGNPECDGKEDCSDGSDE |
| | | | | KDCKCGLRSFTRQARVVGGTDADEGEWPWQVSLHALGQGHICG |
| | | | | ASLISPNWLVSAAHCYIDDRGFRYSDPTQWTAFLGLHDQSQRS |
| | | | | APGVQERRLKRIISHPFFNDFTFDYDIALLELEKPAEYSSMVR |
| | | | | PICLPDASHVFPAGKAIWVTGWGHTQYGGTGALILQKGEIRVI |
| | | | | NQTTCENLLPQQITPRMMCVGFLSGGVDSCQGDSGGPLSSVEA |
| | | | | DGRIFQAGVVSWGDGCAQRKPGRTRLPLFRDWLR |
| 405 | 1144 | 1 | 424 | RHEEDLGNLWENTRFTDCSFFVRGQEFKAHKSVLAARSPVFNA |
| | | | | MFEHEMEESKKNRVEINDLDPEVFKEMMRFIYTGRAPNLDKMA |
| | | | | DNLLAAADKYALERLKVMCEKALCSNLSVENVADTLVLADLHS |
| | | | | \AEQLKAQAIDFINFRCSVLRQLGCKDGKNWNSNQATDIMETSG |
| | | | | GKSMIQSHPHLVAEAFRALASAQFGPQFGIPRKRKQS*NLGNL |
| | | | | WENTRFTDCSFFVRGQEFKAHKSVLAARSPVFNAMFEHEMEES |
| | | | | KKNRVEINDLDPEVFKEMMRFIYTGRAPNLDKMADNLLAAADK |
| | | | | YALERLKVMCEKALCSNLSVENVADTLVLADLHSGRTVESTSH |
| | | | | RLY |
| 406 | 1145 | 1 | 1021 | QRGGIPGKFQEDSGSVDWALGPFWGIFQADFGCMRFYLSAQTS |
| | | | | DPVLRM*WGPSPISHPTSLCPGRGGRGQTTGSLCLGQQCCPLS |
| | | | | CPNIPSRHKRWRL*AALVAGSRGSCTLRS*R*RTPLPVTRNLP |
| | | | | R/CHLHLHPTGDLRVHVHQHCLLHGHVPPGAALLQCGGCDLRG |
| | | | | EAAGLLFLGHACLRGSVNLRRDQWLPV\PYSRLCFSGAREGHL |
| | | | | PSLLAMIHVRHCTPIPALLVC\PIKVNLLIPVAYLVFWAFLLV |
| | | | | FSFISEHMVCGVGVIIILTGVPIFFLGVFWRSKPKCVHRLTES |
| | | | | MTHWGQELCFVVYPQDAPEEEENGPCPPSLLPATDRSKPQ |
| 407 | 1146 | 2 | 1280 | AAALVAEYLALLEDHRHLPVGCVSFQNISSNVREESAISDDIL |
| | | | | SPDEEGFCSGKHFTELGLVGLLEQAAGYFTMGGLYEAVNEVYK |
| | | | | NLIPILEAHRDYKKLAAVHGKLQEAFTKIMHQSSGWERVFGTY |
| | | | | FRVGFYGAHFGDLDEQEFVYKEPSITKLAEISHRLEEFYTERF |
| | | | | GDDVVEIIKDSNPVDKSKLDSQKAYIQITYVEPYFDTYELKDR |
| | | | | VTYFDRNYGLRTFLFCTPFTPDGRAHGELPEQHKRKTLLSTDH |
| | | | | AFPYIKTRIRVCHREETVLTP\VEVAIEDMQKKTRELAFATEQ |
| | | | | DPPDAKMLQMVLQGSVGPTVNQGPLEVAQVFLAEIPEDPKLFR |
| | | | | HHNKLRLCFKDF\*KKCEDALRKNKALIGPDQKEYHRELERNY |
| | | | | CRLREALQPLLTQRLPQLMAPTPPGLRNSLNRASFRKADL |
| 408 | 1147 | 55 | 651 | GEGQQWQSTPLSPLQPTVADFLNLAWWTSAAAW*VLSGRWVEK |
| | | | | VLPGREGSEEK*GMASSSADHLHSAPRALQ\SLFQQLLYGLIY |
| | | | | HSWFQAGR*GFGGASSSPGPQSELRRLHGEGGVYD*GRPETLP |
| | | | | FSVGGAEALWALADPAEAEGSPETRESSCVMKQTQYYFGSVNA |
| | | | | SYNAIIDCGNCSRCWQWGGTRGQGRNL |
| 409 | 1148 | 1855 | 904 | VAGIPACFDN/FTEALAETACRQMGYSSKPTFRAVEIGPDQDL |
| | | | | DVVEITENSQELRMRNSSGPCLSGSLVSLHCLACGESLKTPRV |
| | | | | VGGEEASVDSWPWQVSIQYDKQHVCGGSILDPHWVLTAAHCFR |
| | | | | KHTDVFNWKVRAGSDKLGSFPSLAVAKIIIIEFNPMYPKDNDI |
| | | | | ALMKLQFPLTFSGTVRPICLPFFDEELTPATPLWIIGWGFTKQ |
| | | | | NGGKMSDILLQASVQVIDSTRCNADDAYQGEVTEKMMCAGIPE |
| | | | | GGVDTCQGDSGGPLMYQSDQWHVVGIVSWGYGCGGPSTPGVYT |
| | | | | KVSAYLNWIYNVWKAEL |
| 410 | 1149 | 3 | 964 | TISTVRWNSRIGMVLGVAIQKRAV\PGLY\AFEEAYARADKEA |
| | | | | PRPCHKGSWCSSNQLCRECQAFMAHTMPKLKAFSMSSAYNAYR |
| | | | | AVYAVAHGLHQLLGCASGACSRGRVYPQWLLEWIHKVHFLLHK |
| | | | | DTVAFNDNRDPLSSYNIIAWDWNGPKWTFTVLGSSTWSPVQLN |
| | | | | INETKIQWHGKDNQVPKSVCSSDCLEGHQRVVTGFHHCCFECV |
| | | | | PCGAGTFLNKS/SYLGKDLPENYNEAKCVTFSLLFNFVSWIAF |
| | | | | FTTASVYDGKYLPAMTIMAGLSSLSSGFGGYFLPKCYVILCRP |
| | | | | DLNSTEHFQASKQDYTRRCGST |
| 411 | 1150 | 2 | 1378 | VARGAFHPKMGPSFPSPKPGSERLSFVSAKQSTGQDTEAELQD |
| | | | | ATLALHGLTVEDEGNYTCEFATFPKGSVRGMTWLRVIAKPKNQ |
| | | | | AEAQKVTFSQDPTTVALCISKEGRPPARISWTSSLDWEAKETQ |
| | | | | VSGTLAGTVTVTSRFTLVPSGRADGVRVTCKVEHESFEEPALI |
| | | | | PVTLSVRYPPEVSISGYDDNWYLGRTDATLSCDVRSNPEPTGY |
| | | | | DWSTISGTFPTSAVAQGSQLVIHAVDSLFNTTFVCTVTNAVGM |
| | | | | GRAEQVIFVRETPNTAGAGATGGIIGGIIAAIIATADA\TGIL |
| | | | | ICRQQRKEQTLQGAEEDEDLEGPPSYKPPTPKAKLEAQEMPSQ |
| | | | | LFTLGASEHSPLKTPYFDAGASCTEQEMPRY |
| | | | | TLEERSGP |
| | | | | LHPGATSLGSPIPVPPGPPAVEDVSLDLEDEEGEEEEEYLDKI |
| | | | | NPIYDAIISYSSPSDSYQGKGFVMSRAMYV |
| 412 | 1151 | 1 | 1828 | GTRLREDKNHNMYVAGCTEVEVKSTEEAFEVFWRGQKKRRIAN |
| | | | | THLNRESSRSHSVFNIKLVQAPLDADGDNVLQEKEQITISQLS |
| | | | | LVDLAGSERTNRTRAEGNRLREAGNINQSLMTLRTCMDVLREN |
| | | | | QMYGTNKMVPYRDSKLTHLFKNYFDGEGKVRMIVCVNPKAEDY |
| | | | | EENLQVMRFAEVTQEVEVARPVDKAICGLTPGRRYRNQPRGP\ |
| | | | | IGNEPLVTDVVLQSFPPLPSCEILDINDEQTLPRLIEALEKRH |
| | | | | NLRQMMIDEFNKQSNAFKALLQEFDNAVLSKENHMQGKLNEKE |
| | | | | KMISGQKLEIERLEKKNKTKEYKIEILEKTTTIYEEDKRNLQQ |
| | | | | ELETQNQKLQRQFSDKRRLEAPLQGMVTETTMKWEKECERRVA |
| | | | | AKQLEMQNKLWVKDEKLKQLKAIVTEPKTEKPERPSRERDREK |
| | | | | VTQRSVSPSPVPLLFQPDQNAPPIRLRHRRSRSAGDRWVDHKP |
| | | | | ASNMQTETVMQPHVPHAITVSVANEKALAKCEKYMLTHQELAS |
| | | | | DGEIETKLIKGDIYKTRGGGQSVQFTDIETLKQESPNGSRKRR |
| | | | | SSTVAPAQPDGAESEWTDVETRCSVAVEMRAGSQLGPGYQHHA |
| | | | | QPKRKKP |
| 413 | 1152 | 1 | 336 | PFSSSSVSSKGSDPFGTLDPFGSGSFNSAEGFADFSQMS/KGK |
| | | | | STPVSQLGSADFPEAPDPFQPLGADSGDPFQSKKGFGDPFSGK |
| | | | | DPFVPSSAAKPSKASASGFADFTSVS |
| 414 | 1153 | 1 | 1334 | MSLMVVSMACVGLFLVQRAGPHMGGQDKPFLSAWPSAVVPRGG |
| | | | | HVTLRCHYRHRFNNFMLYKEDRIHIPIFHGRIFQESFNMSPVT |
| | | | | TAHAGNYTCRGSHPHSPTGWSAPSNPVVIMVTGNHRKPSLLAH |
| | | | | PGPLVKSGERVILQCWSDIMFEHFFLHKEGISKDPSRLVGQIH |
| | | | | DGVSKANFSIGPMMQDLAGTYRCYGSVTHSPYQLSAPSDPLDI |
| | | | | VITGLYEKPSLSAQPGPTVLAGESVTLSCSSRSSYDMYHLSRE |
| | | | | GEAHERRFSAGPKVNGTFQADFPLGPATHGGTYRCFGSFRDSP |
| | | | | YEWSNSSDPLLVSVTGNPSNSWPSPTEPSSETGNPRHLHVLIG |
| | | | | TSVVIILFILLLFFLLHRWCSN\KKNAAVMDQESAGNRTANSE |
| | | | | DSDEQDPQEVTYTQLNHCVFTQRKITRPSQRPKTPPTDIIVYT |
| | | | | ELPNAESRSKVVSCP |
| 415 | 1154 | 1 | 1570 | MSLRVHTLPTLLGAVVRPGCRELLCLIMITVTVGPGASGVCPT |
| | | | | ACICATDIVSCTNKNLSKVPGNLFRLIKRLDLSYNRIGLLDSE |
| | | | | WIPVSFAKLNTLILRHNNITSISTGSFSTTPNLKCLDLSSNKL |
| | | | | KT\VKNAVFQELKVLEVLLLYNNHISYLDPSAFGGLSQLQKLY |
| | | | | LSGNFLTQFPMDLYVGRFKLAELMFLDVSYNRIPSMPMHHINL |
| | | | | VPGKQLRGIYLHGNPFVCD\CSLVSLLVFWYRRHFSSVMDFKN |
| | | | | DYTCRLWSDSPHSRQVLLLQDSFMNCSDSIINGSFRALGFIHE |
| | | | | AQVGERLMVHCDSKTGNANTDFIWVGPDNRLLEPDKEMENFYV |
| | | | | FHNGSLVIESPRFEDAGVYSCIAMNKQRLLNETVDVTINVSNF |
| | | | | TVSRSHAHEAFNTAFTTLAACVASIVLVLLYLYLTPCPCKCKT |
| | | | | KRQKNMLHQSNAHSSILSPGPASDASADERKAGAGKRVVFLEP |
| | | | | LKDTAAGQNGKVRLFPSEAVIAEGILKSTRGKSDSDSVNSVFS |
| | | | | DTPFVAST |
| 416 | 1155 | 2 | 1928 | ASDFIRSLDHCGYLSLEGVFSHKFDFELQDVSSVNEDVLLTTG |
| | | | | LLCKYTAQRFKPKYKFFHKSFQEYTAGRRLSSLLTSHEPEEVT |
| | | | | KGNGYLQKMVSISDITSTYSSLLRYTCGSSVEATRAVMKHLAA |
| | | | | VYQHGCLLGLSIAKRPLWRQESLQSVKNTTEQEILKAININSF |
| | | | | VECGIHLYQESTSKSALSQEFEAFFQGKSLYINSGNIPDYLFD |
| | | | | FFEHLPNCASALDFIKLGFYGGAMASWEKAAEDTGGIHMEEAP |
| | | | | ETYIPSRAVSLFFNWKQEFRTLEVTLRDFSKLNKQDIRYLGKI |
| | | | | FSSATSLRLQIKRCAGVAGSLSLVLSTCKNIYSLMVEASPLTI |
| | | | | EDERHITSVTNLKTLSIHDLQNQRLPGGLTDSLGNLKNLTKLI |
| | | | | MDNIKMNEEDAIKLAEGLKNLKKMCLFHLTHLSDIGEGMDYIV |
| | | | | KSLSSEPCDLEEIQLVSCCLSANAVKILAQNLHNLVKLSILDL |
| | | | | SENYLEKDGNEALHELIDRMNVLEQLTALMLPWGCDVQGSLSS |
| | | | | LLKHLEEVPQLVKLGLKNWRLTDTEIRILGAFFGKNPLKNFQQ |
| | | | | LNLAGNRVSSDGWLAFMGVFENLKQLVFFDFSTKEFLPDPALV |
| | | | | RKLSQVLSKLTFLQEALVGWQFDDDDLSVITGRRA |
| 417 | 1156 | 342 | 718 | ASDRKVAMTCDCFWFRTMLDQHASCMEVGTERERQAG\GLVMP |
| | | | | DPSGFPTGEKVLQDDEFTCDLFRFLQLLCEGHNSGL*VPGTSD |
| | | | | DTKA*IMFSSQ**QEPVSSNYASF*RQQIILEHGSAKGSG |
| 418 | 1157 | 1 | 135 | EITHIVGETAAFLCPRLRLRRGGKDGSPKPGFLASVIPVDRRP |
| | | | | GE*DITHIVGETAAFLCPRLRLRRGGKDGSPKPGFLASVIPVD |
| | | | | RRPGE |
| 419 | 1158 | 173 | 943 | SKFIFYVDSQSMIFFFQTPTRHKVLIMEFCPCGSLYTVLEEPS |
| | | | | NAYGLPESEFLIVLRDVVGGMNHLRENGIVHRDIKPGNIMRVI |
| | | | | GEDGQSVYKLTDFGAARELEDDEQFVSLYGTEEYLHPDMYERA |
| | | | | VLRKDHQ\KKYGAT\VDLW\SIGVTFYQGKPTGS\LAI*HPFE |
| | | | | GASVRDKASDGIKIITGKGLLGAIS\GVQKSKKNG\PI\DWEW |
| | | | | EDMPVSCSPSSGVLRVPNLPPVLA\NILESRSRKKCWGF*PSF |
| | | | | LQEN |
| 420 | 1159 | 987 | 500 | GSTISCERSLRSLWTAHWALPEMDSRIPYDDYPVVFLPAYENP |
| | | | | PAWIPPHERVHHPDYNNELTQFLPRTITLKKPPGAQLGFNIRG |
| | | | | GKASQLGIFISKVIPDSDAHRAGLQEGDQVLAVNDVDFQDIEH |
| | | | | SKAVEILKTAREISMRVRFFPYNYHRQKERTVH |
| 421 | 1160 | 3 | 890 | HEQVSALHRRIKAIVEVAAMCGVNIICFQEAWTMPFAFCTREK |
| | | | | LPWTEFAESAEDGPTTRFCQKLAKNHDMVVVSPILERDSEHGD |
| | | | | VLWNTAVVISNSGAVLGKTRKNHIPRVGDFNESTYYMEGNLGH |
| | | | | PVFQTQFGRIAVNICYGRHHPLNWLMYSINGAEIIFNPSATIG |
| | | | | ALSESLWPIEARNAAIANHCFTCAINRVGTEHFPNEFTSGDGK |
| | | | | KAHQDFGYFYGSSYVAAPDSSRTPGLSRSRDGLLVAKLDLNLC |
| | | | | QQVNDVWNFKMTGRYEMYARELAEAVKSNYSPTL |
| 422 | 1161 | 5214 | 352 | MAKSGGCGAGAGVGGGNGALTWVNNAAKKEESETANKNDSSKK |
| | | | | LSVERVYQKKTQLEHILLRPDTYIGSVEPLTQFMWVYDEDVGM |
| | | | | NCREVTFVPGLYKIFDEILVNAADNKQRDKNMTCIKVSIDPES |
| | | | | NIISINNNGKGIPVVEHKVEKVYVPALIFGQLLTSSNYDDDEK |
| | | | | KVTGGRNGYGAKLCNIFSTKFTVETACKEYKHSFKQTWMNNMM |
| | | | | KTSEAKIKHFDGEDYTCITFQPDLSKFKMEKLDKDIVALMTRR |
| | | | | AYDLAGSCRGVKVMFNGKKLPVNGFRSYVDLYVKDKLDETGVA |
| | | | | LKVIHELANERWDVCLTLSEKGFQQISFVNSIATTKGGRHVDY |
| | | | | VVDQVVGKLIEVVKKKNKAGVSVKPFQVKNHIWVFINCLIENP |
| | | | | TFDSQTKENMTLQPKSFGSKCQLSEKFFKAASNCGIVESILNW |
| | | | | VKFKAQTQLNKKCSSVKYSKIKGIPKLDDANDAGGKHSLECTL |
| | | | | ILTEGDSAKSLAVSGLGVIGRDRYGVFPLRGKILNVREASHKQ |
| | | | | IMENAEINNIIKIVGLQYKKSYDDAQSLKTLRYGKIMIMTDQD |
| | | | | QDGSHIKGLLINFIHHNWPSLLKHGFLEEFITPIVKASKNKQE |
| | | | | LSFYSIPEFDEWKKHIENQKAWKIKYYKGLGTSTAKEAKEYFA |
| | | | | DMERHRILFRYAGPEDDAAITLAFSKKKIDDRKEWLTNFMEDR |
| | | | | RQRRLHGLPEQFLYGTATKHLTYNDFINKELILFSNSDNERSI |
| | | | | PSLVDGFKPGQRKVLFTCFKRNDKREVKVAQLAGSVAEMSAYH |
| | | | | HGEQALMMTIVNLAQNFVGSNNINLLQPIGQFGTRLHGGKDAA |
| | | | | SPRYIFTMLSTLARLLFPAVDDNLLKFLYDDNQRVEPEWYIPI |
| | | | | IPMVLINGAEGIGTGWACKLPNYDAREIVNNVRRMLDGLDPHP |
| | | | | MLPNYKNFKGTIQELGQNQYAVSGEIFVVDRNTVEITELPVRT |
| | | | | WTQVYKEQVLEPMLNGTDKTPALISDYKEYHTDTTVKFVVKMT |
| | | | | EEKLAQAEAAGLHKVFKLQTTLTCNSMVLFDHMGCLKKYETVQ |
| | | | | DILKEFFDLRLSYYGLRIGWLVGMLGAEFTKLNNQARFILEKI |
| | | | | QGKITI*NRSKKDLIQMLVQRGYESDPVKAWKEAQEKAAEEDE |
| | | | | TQNQHDDSSSDSGTPSGPDFNYILNMSLWSLTKEKVEELIKQR |
| | | | | DAKGREVNDLKRKSPSDLWKEDLAAFVEELDKVESQEREDVLA |
| | | | | GMSGKAIKGKVGKPKVKKKQLEETMPSPYGRRIIPEITAMKAD |
| | | | | ASKKLLKXKKGDIDTAAVKVEFDEEFSGAPVEGAGBEALTPSV |
| | | | | PINKGPKPKREKKEPGTRVRKTPTSSGKPSAKKVKRNTPWSDD |
| | | | | ESKSESDLEETEPVVIPRDSLLRRAAAERPKYTFDFSEEEDDD |
| | | | | ADDDDDDDNNDLEELKVKASPITNDGEDEFVPSDGLDKDERFS |
| | | | | PGKSKATPEKSLHDKKSQDFGNLFSFPSYSQKSEDDSAKFDSN |
| | | | | EEDSASVFSPSFGLKQTDKVPSKTVAAKKGKPSSDTVPKPKRA |
| | | | | PKQKKVVEAVNSDSDSEFGIPKKTTTPKGKGRGAKKRKASGSE |
| | | | | NEGDYNPGRKTSKTTSKKPKKTSFDQDSDVDIFPSDFPTEPPS |
| | | | | LPRTGRREVKYFABSDEEEDDVDFAMFN |
| 423 | 1162 | 1 | 219 | KGCLAASFNCIFLYTGELYPTMIR*VEA*WENDSLFIGKDILL |
| | | | | CTGQTPELNQVHPSPKAPPNTHHCRHSSH |
| 424 | 1163 | 1454 | 446 | ENSFECKDCGKAFSRGYQLSHHQKIHTGEKPYECKECKKAFRW |
| | | | | GNQLTQHQKIHTGEKPYECKDCGKAFRWGSSLVIHKRIHTGEK |
| | | | | PYECKDCGKAFRRGDELTQHQRFHTGEKDYECKDCGKTFSRVY |
| | | | | KLIQHKRIHSGEKPYECKDCGKAFICGSSLIQHKRIHTGEKPY |
| | | | | ECQECGKAFTRVNYLTQHQKIHTGEKPHECKECGKAFRWGSSL |
| | | | | VKHERIHTGEKPYKCTECGKAFNCGYHLTQHERIHTGETPYKC |
| | | | | KECGKAFIYGSSLVKHERIHTGVKPYGCTECRKSFSHGHQLTQ |
| | | | | HQKTHSGAKSYECKECGKACNHLNHLREHQRIHNS |
| 425 | 1164 | 826 | 407 | HQYLDDLYPLHVMTILLKSHFFTMLKRPVGSSSFASLPFYHQS |
| | | | | ILLRKNQMKRKKTQQDLTHINWTLQAVSIQTCIWLQKKPSSYF |
| | | | | HQLPNQVL*PENSGPESCLYDLAAVVVHHGSG |
| 426 | 1165 | 464 | 29 | XLDPDTLPAVATLLMDVMFYSNGVKDPMATGDDCGHIRFFSFS |
| | | | | LIEGYISLVMDVQTQQRFPSNLLFTSASGELWKMVRIGGQPLG |
| | | | | FGPVWESGPTGPTSPLILPVTPSSSHRQAASQVTTTKQGQWLC |
| | | | | LKRPSARSPDHTACLG* |
| 427 | 1166 | 649 | 901 | EAPLTSVCFSLERRFGSSSNTTSFGTLASQNAPTFGSLSQQTS |
| | | | | GFGTQSSGFSGFGSGTGGFSFGSNNS*VSPRSLTLIKSIK |
| 428 | 1167 | 3 | 340 | EEPQGSPIWVWLAGSLTSVSCFLPFQRMRIKPHQGQYIGEMSF |
| | | | | LQEHKGECRPQKD*ARQENPCGPCSERRKHLLGQDPKTCKCSC |
| | | | | FNITDSRCKARPLELNERTCRCDKPRR |
| 429 | 1168 | 355 | 1312 | TLWAGPGLCPQSESSSSVPAPWEPHVERALRTDRNQGQRPLLS |
| | | | | ASWAPAPARPLFLTSPVLLPKSRAIPAARDPS*AGIFCLLEMA |
| | | | | GGQASVVIIGSAGVKGCRWGSSGKSHSLSPSRKGNLHLLSQEP |
| | | | | QTTVVHNATDGIKGSTESCNTTTEDEDLKVRXQEIIKITEQLI |
| | | | | EAINNGDFEAYTKICDPGLTSFEPEALGNLVEGMDFHKFYFEN |
| | | | | REWVRAADILLPAPLPLCLCLLLTFSSQLPTFPLFDLRAAKKL |
| | | | | CMLVPLCPDGCRQAPLKAKLLSSKCHSFCSCFVAVPVTTIKLT |
| | | | | YFLPGAVAYACNPNTLGG |
| 430 | 1169 | 439 | 728 | ERAGAGGAAACRAGTRSGATSRTPWPLHRQLSMMLMLAQSNPQ |
| | | | | LFALMGTRAGIARELERVEQQSRLEQLSAAELQSRNQGHWADW |
| | | | | LQAYRARLGQ |
| 431 | 1170 | 3 | 440 | NGTLFIMVMHIKDLVSDYKE*WL*RKPLPW*EALLLRDCFFF* |
| | | | | VTENGADPNPYVKTYKLPDNHKTSKRKTKISRKTRNPTFNEML |
| | | | | VYSGYSKETLRQRELQLSVLSAESLRENFFLGGVTLPLKDFNL |
| | | | | SKETVKWYQLTAATYL |
| 432 | 1171 | 433 | 1824 | LHRIMQLAVVVSQVLENGSSVLVCLEEGWDITAQVTSLVQLLS |
| | | | | DPFYRTLEGFQMINEKEWLSFGHKFSQRSRLTIMCQGSGFAPV |
| | | | | FLQFLDCVHQVHNQYPTEFEFNLYYLKFLRFHYVSNRFKTFLL |
| | | | | DSDYERLEHGTLFDDKGEKHAKKGVCIWECIDRIHKRSPIFFN |
| | | | | YLYSPLEIEALKPNVNVSSLKKWDYYIEETLSTGPSYDWMMLT |
| | | | | PKHFPSEDSDLAGEAGPRSQRRTVWPCYDDVSCTQPDALTSLF |
| | | | | SEIEKIEHKINQAPEKWQQLWERVTVDLKEEPRTDRSQRHLSR |
| | | | | SPGIVSTNLPSYQKRSLLHLPDSSMGEEQNSSISPSNGVERRA |
| | | | | ATLYSQYTSKNDENRSFEGTLYKRGALLKGWKPRWFVLDVTKH |
| | | | | QLRYYDSGEDTSCKGHIDLAEVEMVIPAGPSMGAPKHTSDKAF |
| | | | | FDLKTSKRVYNFCAQDGQSAQQWMDKIQSCISDA |
| 433 | 1172 | 1714 | 946 | EVEGPRRVSPAPETLGMEESVVRPSVFVVDGQTDIPFTRLGRS |
| | | | | HRRQSCSVARVGLGLLLLLMGAGLAVQGWFLLQLHWRLGEMVT |
| | | | | RLPDGPAGSWEQLIQERRSHEVNPAAHLTGANSSLTGSGGPLL |
| | | | | WETQLGLAFLRGLSYHDGALVVTKAGYYYIYSKVQLGGVGCPL |
| | | | | GLASTITHGLYKRTPRYPEELELLVSQQSPCGRATSSSRVWWD |
| | | | | SSFLGGVVHLEAGEEVVVRVKDERLVRLRDGTRSYFGAFMV |
| 434 | 1173 | 16 | 367 | QSAELGPRRREGSRRPSCTKASKPWRRRPGGPTSGLG*GPLSP |
| | | | | GPYQCRPSLPAQLYPQSLMAAATLRTPTQVSAASSRPHTPSPT |
| | | | | HVLKPSVRGACSSPRCPGSGTLRRSWVGPFF |
| 435 | 1174 | 27 | 1139 | LWWPPLSRRAAHRQWPGPTAPRGLGHKVKGRGASPAAMWSCSW |
| | | | | FNGTGLVEELPACQDLQLGLSLLSLLGLVVGVPVGLCYNALLV |
| | | | | LANLHSKASMTMPDVYFVNMAVAGLVLSALAPVRLLGPPSSRW |
| | | | | ALWSVGGEVHVAKQIPFNVSSLVAIYSTALLSLDHYIERALPR |
| | | | | TYMASVYNTRHVCGFVWGGALLTSFSSLLFYICSHVSTRALEC |
| | | | | AXMQNAEAADATLVFIGYVVPALATLYALVLLSRVRREDTPLD |
| | | | | RDTGRLEPSAHRLLVATVCTQFGLWTPHYLILLGHTVIISRGK |
| | | | | PVDAHYLGLLHFVKDFSKLLAFSSSFVTPLLYRYMRQSFPSKK |
| | | | | QRLMKKLPCGDRHCSPDHMGVQQVLA |
| 436 | 1175 | 322 | 756 | SESELFTLMPSLPTTNCVHSLQMIPPLSPAPNQELVLGLCYMS |
| | | | | YLAFLYMTFDFCCLYFSTVYAPSFKYICVHTDTHICVCVCIYL |
| | | | | SSVVSKSSAEADGVLQPRRHPASLLIVFATSISESSLLIFSFQ |
| | | | | KTEAKLIVFAVSLAAK |
| 437 | 1176 | 2 | 153 | FFFLRQSLTLSPRLECSGATSASPSAGITGMSHHSQPIVNFLR |
| | | | | ACIPISK |
| 438 | 1177 | 1 | 692 | RQHAEERGRRNPKTGLTLERVGPESSPYLLRRHQRQGQEGEHY |
| | | | | HSCVQLAPTRGLEES/GHGPL/SLAGGPRVGGV/AAAATEAPR |
| | | | | MEWKVKVRSDGTRYVAKRPVRDRLLKARALKIREERSGMTTDD |
| | | | | DAVSEMKMGRYWSKEERKQHLIRAREQRKRREFMMQSRLECLR |
| | | | | EQQNGDSKPELNIIALSHRKTMKKRNKKILDNWITIQEMLAHG |
| | | | | ARSADGKRVYNPLLSVTTV |
| 439 | 1178 | 2 | 616 | SDRGCSAAAGRNMTAVGVQAQRPLGQRQPRRSFFESFIPTLII |
| | | | | TCVALAVVLSSVSICDGHWLLAEDRLFGLWHFCTTTNQSVPIC |
| | | | | FRDLGQAHVPGLAVGMGLVRSVGALAVVAAZFGLEFLMVSQLC |
| | | | | EDKHSQCKWVMGSILLLVSFVLSSGGLLGFVILLRNQVTLIGF |
| | | | | TLMFWCEFTASFLLFLNAISGLHINSITHPWE |
| 440 | 1179 | 2 | 540 | WILPNLYLGSARDSANLESLAKLGIRYILNVTPNLPNFFEKNG |
| | | | | DFHYKQIPISDHWSQNLSRFFPEAIEFIDEALSQNCGVLVHCL |
| | | | | AGVSRSVTVTVAYLMQKLHLSLNDAYDLVKRKKSNISPNFNFM |
| | | | | GQLLDFERSLRLEERHSQEQGSGGQASAASNPPSFFTTPTSDG |
| | | | | AFELAPT |
| 441 | 1180 | 940 | 463 | RKSLHENKLKRLQEKVEVLEAKKEELETENQVLNRQNVPFEDY |
| | | | | TRLQKRLKDIQRRHNEFRSLILVPNMPPTASINPVSFQSSAMG |
| | | | | SKHGTTISSSYAGGTTSKGTLSTSQKTRRTGNNTKKTTRGTWI |
| | | | | FRPIVIMFLENRQIKRGEVGDSVKIDILTCGI |
| 442 | 1181 | 1 | 986 | GRPGAGASELFPSVTTDLSVSKQNACLTCVDFVTVHVCMGFWG |
| | | | | IGPGALSTSCIPYPLSHGPGSVKAEMLHMYSQKDPLILCVRLA |
| | | | | VLLAVTLTVPVVLFPIRRALQQLLFPGKAFSWPRHVAIALILL |
| | | | | VLVNVLVICVPTIRDIFGVIGSTSAFSLIFILPSIFYLRIVPS |
| | | | | EVEPFLSWPKIQALCFGVLGVIFMAVSLGFMFADWATGQSRMS |
| | | | | GH*SGPAGPGPCAHAHGGVRAAP*GPSCPTCGGGWFP*TWLSE |
| | | | | AGDSRGCRLAHFPPPQGCQAWIMALIPTPTPWEEEEEEEEEEE |
| | | | | EEEEEEEEEARSWWSLCPAQSSLPPPG |
| 443 | 1182 | 460 | 27 | INELRYHLEESPDKNVLLCLEERDWDPGLAIIDNLMQSINQSK |
| | | | | KTVFVLTKKYAKSRNFKTAFYLALQRLMDENNDVIIFILLEPV |
| | | | | LQHSQYLRLRQRIKKSSILQWPDNPKAEGLFWQTLRNVVLTEN |
| | | | | DSRYNNMYVDSIKQY |
| 444 | 1183 | 1682 | 230 | DDPIKTSWTPPRYVLSMSEERHERVRKKYHILVEGDGIPPPIK |
| | | | | SFKEMKFPAAILRGLKKKGIHHPTPIQIQGIPTILSGRDMIGI |
| | | | | AFTGSGKTLVFTLPVIMFCLEQEKRRLPFSKREGPYGLIKPSR |
| | | | | ELARQTHGILEYYCRLLQEDSSPLLRCALCIGGMSVKEQMETI |
| | | | | RHGVHMMVATPGRLMDLLQKKMVSLDICRYLALDEADRMIDMG |
| | | | | FEGDIRTIFSYFKGQRQTLLFSATMPKKIQNFAKSALVKPVTI |
| | | | | NVGRAGAASLDVIQEVEYVKEEAKMVYLLECLQKTPPPVLIFA |
| | | | | EKKADVDAIHEYLLLKGVEAVAIHGGKDQEERTKAIEAFREGK |
| | | | | KDVLVATDVASKGLDFPAIQHVINYDMPEEIENYVHRIGRTGR |
| | | | | SGNTGIATTFINKACDESVLMDLKALLLEAKQKVPPVLQVLHC |
| | | | | GDESMLDIGGERGCAFCGGLGHRITDCPKLEAMQTKQVSNIGR |
| | | | | KDYLAHSSMDF |
| 445 | 1184 | 1 | 375 | IETTQPSEDTNANSQDNSMQPETSSQQQLLSPTLSDRGGSRQD |
| | | | | AADAGKPQRKFGQWRLPSAPKPISHSVSSVNLRFGGRTTMKSV |
| | | | | VCKIVRPMTDAASCGSEVKKWWTRQLTVESDESGDDLLDI |
| 446 | 1185 | 2 | 223 | NDRFSACYFTLKLKEAAVRQREALKKLTKNIATDSYISVNLRD |
| | | | | VYARSIMEMLRKKGRERASTRSSGGDDFWF |
| 447 | 1186 | 2 | 1031 | FTVFILGITIRPLVEFLDVKRSNKKQQAVSEEIYCRLFDHVKT |
| | | | | GIEDVCGHWGHNFWRDKFKKFDDKYLRKLLRLENQPKSSIVSL |
| | | | | YKKLEIKHAIEMAETGMISTVPTFASIMDCPREEKLKVTSSET |
| | | | | DEIRELLSRNLYQIRQRTLSYNRHSLTADTSERQAKEILIRRR |
| | | | | HSLRESIRKDSSLNREHRASTSTSRYLSLPKNTKLPEKLQKRR |
| | | | | TISIADGNSSDSDADAGTTVLNLQPRARRFLPEQFSKKSPQSY |
| | | | | KMEWKNEVDVDSGRDMPSTPPTPHSREKGTQTSGLLQQPLLSK |
| | | | | DQSGSEREDSLTEGIPPKPPPRLVWRASEPGSRKARFGSEKP |
| 448 | 1187 | 3 | 444 | HEEASGLSVWMGKQMEPLHAVPPAAITLILSLLVAVFTECTSN |
| | | | | VATTTLFLPIFASMSRSIGLNPLYIMLPCTLSASFAFMLPVAT |
| | | | | PPNAIVFTYGHLKVADMVKTGVIMNIIGVFCVFLAVNTWGRAI |
| | | | | FDLDHFPDWARVTHIET |
| 449 | 1188 | 3 | 125 | HELENNWLQHEKAPTEEGKKELLALSNANPSLLERHCAYL |
| 450 | 1189 | 1 | 188 | GNIIYMYMQPGARSSQDQGKFLTLFYNIVTPLLNPLIYTLRNR |
| | | | | EVKGALGRLLLGKRELGKE |
| 451 | 1190 | 10 | 1879 | PLEQRSNCRVDPRVRTHTMASDTSSLVQSHTYKKREPADVPYQ |
| | | | | TGQLHPAIRVADLLQHITQMKCAEGYGFKEEYESFFEGQSAPW |
| | | | | DSAKKDENRMKNRYGNIIAYDHSRVPLQTIEGDTNSDYINGNY |
| | | | | IDGYHRPNHYIATQGPMQETIYDFWRMVRHENTASIIMVTNLV |
| | | | | EVGRVKCCKYWPDDTEIYKDIKVTLIETELLAEYVIRTFAVEK |
| | | | | RGVHEIREIRQFHFTGWPDHGVPYHATGLLGFVRQVKSKSPPS |
| | | | | AGPLVVHCSAGAGRTGCFIVIDIMLDMAEREGVVDIYNCVREL |
| | | | | RSRRVNMVQTEEQYVFIHDAILEACLCGDTSVPASQVRSLYYD |
| | | | | MNKLDPQTNSSQIKEEFRTLNMVTPTLRVEDCSIALLPRRHEK |
| | | | | NRCMDILPPDRCLPFLITIDGESSNYINAALMDSYKQPSAFIV |
| | | | | TQHPLPNTVKDFWRLVLDYHCTSVVMLNDVDPAQLCPQYWPEN |
| | | | | GVHRHGPIQVEFVSADLEEDIISRIFRIYNAARPQDGYRMVQQ |
| | | | | FQFLGWPMYRDTPVSKRSFLKLIRQVDKWQEEYNGGEGRTVVH |
| | | | | CLNGGGRSGTFCAISIVCEMLRHQRTVDVFHAVKTLRNNKPNM |
| | | | | VDLLDQYKFCYEVALEYLNSG |
| 452 | 1191 | 603 | 342 | PLTYNKKYTYPWWGDALGWLLALSSMVCIPAWSLYRLGTLKGP |
| | | | | FRERIRQLMCPAEDLPQRNPAGPSAPATPRTSLLRLTELESHC |
| 453 | 1192 | 120 | 449 | TLSESGALFSLGPPPLSLKSSSAPRPYSTLRDCLEHFAELFDL |
| | | | | GFPNPLAERIIFETHQIHFANCSLGQPTFSDPPEDVLLAMIIA |
| | | | | PKLIPFLITKVVWRSKDSEAQA |
| 454 | 1193 | 1838 | 1066 | CEEREQEKDDVDVAKLPTIVEKVILPKLTVIAENMWDPFSTTQ |
| | | | | TSRMVGITLKLINGYPSVVNAENKNTQVYLKALLLRMRRTLDD |
| | | | | DVFMPLYPKNVLENKNSGPYLFFQRQFWSSVKLLGNFLQWYGI |
| | | | | FSNKTLQELSIDGLLNRYILMAFQNSEYGDDSIKKAQNVINCF |
| | | | | PKQWFMNLKGERTISQLENFCRYLVHLADTIYPNSIGCSDVEK |
| | | | | RNARENIKQIVKLLASVRALDHAMSVASDHNVKEFKSLIEGH |
| 455 | 1194 | 112 | 1361 | TPFCFLCSLVFRSRVWAEPCLIDAAKEEYNGVIEEFLATGEKL |
| | | | | FGPYVWGRYDLLFMPPSFPFGGMENPCLTFVTPCLLAGDRSLA |
| | | | | DVIIHEISHSWFGNLVTNANWGEFWLNEGFTMYAQRRISTIKF |
| | | | | GAAYTCLEAATGRALLRQHMDITGEENPLNKKRVKIEPGVDPD |
| | | | | DTYNETPYEKGFCFVSYLAHLVGDQDQFDSFLKAYVHEFKFRS |
| | | | | ILADDFLDFYLEYFPELKKKRVDIIPGFEFDRWLNTPGWPPYL |
| | | | | PDLSPGDSLMKPAEELAQLWAAEELDMKAIEAVAISPWKRYQL |
| | | | | VYFLDKILQKSPLPPGNVKKLGDTYPSISNARNAELRLRWGQI |
| | | | | VLKNDHQEDFWKVKEFLHNQGKQKYTLPLYHAMMGGSEVAQTL |
| | | | | AKETFASTASQLHSNVVNYVQQIVAPKGS |
| 456 | 1195 | 1 | 889 | CASGSSGWRPVLWAGAFTMASAELDYTIEIPDQPCWSQKNSPS |
| | | | | PGGKEAETRQPVVILLGWGGCKDKNLAKYSAIYHKRGCIVIRY |
| | | | | TAPWHMVFFSESLGIPSLRVLAQKLLELLFDYEIEKEPLLFHV |
| | | | | FSNGGVMLYRYVIELLQTRRFCRLRVVGTIFDSAPGDSNLVGA |
| | | | | LRALAAILERRAAMLRLLLLVAFALVVVLFHVLLAPITALFHT |
| | | | | HFYDRLQDAGSRWPELYLYSRADEVVLARDIERMVEARLARRV |
| | | | | LARSVDFVSSAHVSHLRDYPTYYTSLCVDFMR\NRVRC |
| 457 | 1196 | 2 | 295 | PRVRDRLPSTGVRDRKGDKPWKESGGSVEAPRMGFTHPPGHLS |
| | | | | GCQSSLASGETGTGSADPPGGPRPGLTRRAPVKDTPGRAPAAD |
| | | | | AAPAGPSSCLG |
| 458 | 1197 | 1299 | 682 | QGRTSCIGLYTYQRRICKYRDQYNWFFLARPTTFAIIENLKYF |
| | | | | LLKKDPSQPFYLGHTIKSGDLEYVGMEGGIVLSVESMKRLNSL |
| | | | | LNIPEKCPEQGGMIWKISEDKQLAVCLKYAGVFAENAEDADGK |
| | | | | DVFNTKSVGLSIKEAMTYHPNQVVEGCCSDMAVTFNGLTPNQM |
| | | | | HVMMYGVYRLRAFG\HIFNDALVFLPPNGSDND |
| 459 | 1198 | 779 | 61 | HEGKPTRGRGRGGSLSTRGRGSEVPDSAHLAPTPLFSESGCCG |
| | | | | LRSRFLTDCKMEEGGNLGGLIKMVHKLVLSGAWGMQMWVTFVS |
| | | | | GFLLFRSLPRHTFGLVQSKLFPFYFHISMGCAFINLCILASQH |
| | | | | AWAQLTFWEASQLYKLFLSLTLATVNARWLEPRTTAAMWALQT |
| | | | | VEKERGLGGEVPGSRQGPDPYRQLREKDPKYSAKRQNFFRYHG |
| | | | | LSSLCNLGCVLSNGKCLA\AKPWK |
| 460 | 1199 | 517 | 815 | KQLDKQLRADPSGSLPPKPPSPPPPLEAGGRPPEVP/PRGPSA |
| | | | | VPSFPSVSGDWGGPVEAG/EGGQQGRGRARARPCSLPPLLPPS |
| | | | | PVCRKSGSRAPLGCDG |
| 461 | 1200 | 1 | 583 | RNQLSSQKSVPWVPILKSLPLWAIVVAHFSYNWTFYTLLTLLP |
| | | | | TYMKEILRFNVQENGFLSSLPYLGSWLCMILSGQAADNLRAKW |
| | | | | NFSTLCVRRIFSLIGMIGPAVFLVAAGFIGCDYSLAVAFLTIS |
| | | | | TTLGGFCSSGFSINHLDIAPSYAGILLGITNTFATIPGMVGPV |
| | | | | IAKSLTPDMGISLHRPGWSAVA |
| 462 | 1201 | 25 | 383 | GPSGTTHASAHSGHPGSPRGSLSRHPSSQLAGPGVEGGEGTQK |
| | | | | PRDYIILAILSCFCPMWPVNIVAFAYAVMSRNSLQQGDVDGAQ |
| | | | | RLGRVAKLLSIVALVGGVLIIIASCVINLGVYK |
| 463 | 1202 | 573 | 372 | SLFLSFPPLSFKMTLNDANRNKARLSITGSTGENGRVMTPEFP |
| | | | | KAVHAVPYVSPGMGMNVSVTDLS |
| 464 | 1203 | 2018 | 491 | DDVPPPAPDLYDVPPGLRRPGPGTLYDVPRERVLPPEVADGGV |
| | | | | VDSGVYAVPPPAEREAPAEGKRLSASSTGSTRSSQSASSLEVA |
| | | | | GPGREPLELEVAVEALARLQQGVSATVAHLLDLAGSAGATGSW |
| | | | | RSPSEPQEPLVQDLQAAVAAVQSAVHELLEFARSAVGNAAHTS |
| | | | | DRALHAKLSRQLQKMEDVHQTLVAHGQALDAGRGGSGATLEDL |
| | | | | DRLVACSRAVPEDAKQLASFLHGNASLLFRRTKATAPGPEGGG |
| | | | | TLHPNPTDKTSSIQSRPLPSPPKFTSQDSPDGQYENSEGGWME |
| | | | | DYDYVHLQGKEEFEKTQKELLEKGSITRQGKSQLELQQLKQFE |
| | | | | RLEQEVSRPIDHDLANWTPAQPLAPGRTGGLGPSDRQLLLFYL |
| | | | | EQCEANLTTLTNAVDAFFTAVATNQPPKIFVAHSKFVILSAHK |
| | | | | LVFIGDTLSRQAKAADVRSQVTHYSNLLCDLLRGIVATTKAAA |
| | | | | LQYPSPSAAQDMVERVKELGHSTQQFRRRGQRR |
| 465 | 1204 | 299 | 189 | EMEEPQKSYVNTMDLERDEPLKSTGPQISVSEFSCHCCYDILV |
| | | | | NPTTLNCGHSFCRHCLALWWASSKKTECPECREKWEGFPKVSI |
| | | | | LLRDAIEKLFPDAIRLRFEDIQQNNDIVQSLAAFQKYGNDQIP |
| | | | | LAPNTGRANQQMGGGFFSGVLTAKTGVAVVLLVRRWSSRESEH |
| | | | | DLLVHKAVAKWTAEEVVLWLEQLGPWASLYRERFLSERVNGRL |
| | | | | LLTLTEEEFSKTPYTIENSSHRRAILMELERVKALGVKPPQNL |
| | | | | WEYKAVNPGRSLFLLYALKSSPRLSLLYLYLFDYTDTFLPFIH |
| | | | | TICPLQEDSSGEDIVTKLLDLKEPTWKQWREFLVKYSFLPYQL |
| | | | | IAEFAWDWLEVHYWTSRFLIINAMLLSVLELFSFWRIWSRSEL |
| | | | | K*VGFRFLRLGVAALGSVEVAGLRGVVKGERPLLYGHGAGARF |
| | | | | PHSVLLLPVAKPLPLPLLPRGLC |
| 466 | 1205 | 2 | 242 | EKARMIYEDYISILSPKEVSLDSRVREVINRNLLDPNPHMYED |
| | | | | AQLQIYTLMHRDSFPRFLNSQIYKSFVESTAGSSSES |
| 467 | 1206 | 2 | 619 | LYYSQDEESKIMISDFGLSKMEGKGDVMSTACGTPGYVAPEVL |
| | | | | AQKPYSKAVDCWSIGVIAYTLLCGYPPFYDENDSKLFEQILKA |
| | | | | EYEFDSPYWDDISDSAKDFIRNLMEKDPNKRYTCEQAARHPWI |
| | | | | AGDTALNKNIHESVSAQIRKNFAKSKWRQAFNATAVVRHMRKL |
| | | | | HLGSSLDSSNASVSSSLSLASQKDCASGTFHAL |
| 468 | 1207 | 1 | 352 | RTRGGAVSFEDFIKGLSILLRGTVQEKLNWAFNLYDINKDGYI |
| | | | | TKEEMLDIMKAIYDMMGKCTYPVLKEDAPRQHVETFFQKMDKN |
| | | | | KDGVTIDEFIESCQKDENIMRSMQLFENVI |
| 469 | 1208 | 3 | 1015 | PRSPEHHTPAWHEGRSLGPIMASMADRNMKLFSGRVVPAQGEE |
| | | | | TFENWLTQVNGVLPDWNMSEEEKLKRLMKTLRGPAREVMRVLQ |
| | | | | ATNPNLSVADFLRAMKLVFGESESSVTAHGKFFNTLQAQGEKA |
| | | | | SLYVIRLEVQLQNAIQAGIIAEKDANRTRLQQLLLGGELSRDL |
| | | | | RLRLKDFLRMYANEQERLPNFLELIKMVREEEDWDDAFIKRKR |
| | | | | PKRSESMVERAVSPVAFQGSPPIVIGSADCNVIEIDDTLDDSD |
| | | | | EDVILVESQDPPLPSWGAPPLRDRARPQDEVLVIDSPHNSRAQ |
| | | | | FPSTSGGSGYNGPGELARKRRTLCSYCGEE |
| 470 | 1209 | 1543 | 1351 | SVACTVPLRSMSDPDQDFDKEPDSDSTKHSTPSNSSNPSGPPS |
| | | | | PNSPHRSQLPLEGLEQPACDT |
| 471 | 1210 | 3 | 952 | YSAVEFAERGSGGSSGDELREDDEPVKKRGRKGRGRGPPSSSD |
| | | | | SEPEAELEREAKKSAKKPQSSSTEPARKPGQKEKRVRPEEKQQ |
| | | | | AKPVKVERTRKRSEGFStRRKVEKKKEPSVEEKLQKLHSEIKF |
| | | | | ALKVDSPDVKRCLNALEELGTLQVTSQILQKNTDVVATLKKIR |
| | | | | RYKANKDVMEKAAEVYTRLKSRVLGPKIEAVQKVNKAGMEKEK |
| | | | | AEEKLAGEELAGEEAPQEKAEDKPSTDLSAPVNGEATSQKGES |
| | | | | AEDKEHEEGRDSEEGPRCGSSEDLHDSVREGPDLDRPGSDRQE |
| | | | | RERARGDSEALDEES |
| 472 | 1211 | 5204 | 2902 | LAELSSLSVLRLSHNSISHIAEGAFKGLRSLRVLDLDHNEISG |
| | | | | TIEDTSGAFSGLDSLSKLTLFGNKIKSVAKRAFSGLEGLEHLN |
| | | | | LGGNAIRSVQFDAFVKMKNLKELHISSDSFLCDCQLKWLPPWL |
| | | | | IGRNLQAFVTATCAHPESLKGQSIFSVPPESFVCDDFLKPQII |
| | | | | TQPETTMAMVGKDIRFTCSAASSSSSPMTFAWKKDNEVLTNAD |
| | | | | MENFVHVHAQDGEVMEYTTILHLRQVTFGHEGRYQCVITNHFG |
| | | | | STYSHKARLTVNVLPSFTKTPHDITIRTTTMARLECAATGHPN |
| | | | | PQIAWQKDGGTDFPAARERRMHVMPDDDVFFITDVKIDDAGVY |
| | | | | SCTAQNSAGSISANATLTVLETPSLVVPLEDRVVSVGETVALQ |
| | | | | CKATGNPPPRITWFKGDRPLSLTERHHLTPDNQLLVVQNVVAE |
| | | | | DAGRYTCEMSNTLGTERAHSQLSVLPAAGCRKDGTTVGIFTIA |
| | | | | VVSSIVLTSLVWVCIIYQTRKKSEEYSVTNTDETVVPPDVPSY |
| | | | | LSSQGTLSDRQETVVRTEGGPQANGHIESNGVCPRDASHFPEP |
| | | | | DTHSVACRQPKLCAGSAYHKKPWKAMEKAEGTPGPHKMEHGGR |
| | | | | VVCSDCNTEVDCYSRGQAFHPQPVSRDSAQPSAPNGPEPGGSD |
| | | | | QEHSPHHQCSRTAAGSCPECQGSLYPSNHDRMLTAVKKKPMAS |
| | | | | LDGKGDSSWTLARLYHPDSTELQPASSLTSGSPERAEAQYLLV |
| | | | | SNGHLPKACDASPESTPLTGQLPGKQRVPLLLAPR |
| 473 | 1212 | 2 | 2466 | AAAGAARRVSVRCGRSGPGPGRGAAGLSPADIALASEQGASCS |
| | | | | VRAPERKLRNKLLWQAKMSSIQDWGEEVEEGAVYHVTLKRVQI |
| | | | | QQAANKGARWLGVEGDQLPPGHTVSQYETCKIRTIKAGTLEKL |
| | | | | VENLLTAFGDNDFTYISIFLSTYRGFASTKEVLELLLDRYGNL |
| | | | | TSPNCEEDGSQSSSESKMRTLNAIASILPAWLDQCAEDFREPP |
| | | | | HFPCLQKLLDYLTRMMPGSDPERRAQNLLEQFQKQEVETDNGL |
| | | | | PNTISFSLEEEEELEGGESAEFTCFSEDLVAEQLTYMDAQLFK |
| | | | | KVVPHHCLGCIWSRRDKKENKHLAPTIRATISQFNTLTKCVVS |
| | | | | TILGGKELKTQQRAKIIEKWINIAHECRLIKNFSSLRAIVSAL |
| | | | | QSNSIYRLKKTWAAVPRDRMLMFEELSDIFSDHNNHTTSRELL |
| | | | | MKEGTSKFANLDSSVKENQKRTQRRLQLQKDMGVMQGTVPYLG |
| | | | | TFLTDLTMLDTALQDYIEGGLINFEKRRREFEVIAQIKKLQSA |
| | | | | CNSYCMTPDQKFIQWFQRQQLLTEEESYALSCEIEAAADASTT |
| | | | | SPKPWKSMVKRLNLLFLGADMITSPTPTKEQPKSTASGSSGES |
| | | | | MDSVSVSSCESNHSEAEEGYITPMDTPDEPQKKLSESSSYCSS |
| | | | | IHSMDTNFLQGMSSLINPLSSPPSCNNNPKIHKRSVSVTSITS |
| | | | | TVLPPVYNQQNEDTCIIRISVEDNNGNMYKSIMLTSQDKTPAV |
| | | | | IQRANLKHNLDSDPAEEYELVQVISEDKELVIPDSANVFYAMN |
| | | | | SQVNFDFILRKKNSMEEQVKLRSRTSLTLPRTAKRGCWSNRHS |
| | | | | KITL |
| 474 | 1213 | 1 | 867 | AREKMDSCIEAFGTTKQKRALNTRRMNRVGNESLNRAVAKAAE |
| | | | | TIIDTKGVTALVSDAIHNDLQDDSLYLPPCYDDAAKPEDVYKF |
| | | | | EDLLSPAEYEALQSPSEAFRNVTSEEILKMIEENSHCTFVIEA |
| | | | | LKSLPSDVESRDRQARCIWFLDTLIKFRAHRVVKRKSALGPGV |
| | | | | PHIINTKLLKHFTCLTYNNGRLRNLISDSMKAKITAYVIILAL |
| | | | | HIHDFQIDLTVLQRDLKLSEKRNMEIAKAMRLKISKRRVSVAA |
| | | | | GSEEDHKLGTLSLPLPPAQTSDRLAKRRKIT |
| 475 | 1214 | 2 | 2621 | LSLFGSRALGRSGARAMAKAKKVGARRKASGAPAGARGGPAKA |
| | | | | NSNPFEVKVNRQKFQILGRKTRHDVGLPGYSRARALRKRTQTL |
| | | | | LKEYKERDKSNVFRDKRFGEYNSNMSPEEKMMKRFALEQQRHH |
| | | | | EKKSIYNLNEDEELTHYGQSLADIEKHNDIVDSDSDAEDRGTL |
| | | | | SGELTAAHFGGGGGLLHKKTQQEGEEREKPKSRKELIEELIAK |
| | | | | SKQEKRERQAQREDALELTEKLDQDWKEIQTLLSHKTPKSENR |
| | | | | DKKEKPKPDAYDMMVRELGFEMKAQPSNRMKTEAELAKEEQEH |
| | | | | LRKLEAERLRRMLGKDEDENVKKPKHMSADDLNDGFVLDKDDR |
| | | | | RLLSYKDGKMNVEEDVQEEQSKEASDPESNEEEGDSSGGEDTE |
| | | | | ESDSPDSHLDLESNVESEEENEKPAKEQRQTPGKGLISGKERA |
| | | | | GKATRDELPYTFAAPESYEELRSLLLGRSMEEQLLVVERIQKC |
| | | | | NHPSLAEGNKAKIREKLFGFLLEYVGDLATDDPPDLTVIDKLW |
| | | | | HLYHLCQMFPESASDAIKFVLRDANHEMEEMIETKGRAALPGL |
| | | | | DVLIYLKITGLLFPTSDFWHPVVTPALVCLSQLLTKCPILSLQ |
| | | | | DVVKGLFVCCLFLEYVALSQRFIPELINFLLGILYIATPNKAS |
| | | | | QGSTLVHPFRALG1RSELLVVSAREDVATWQQRSLSLRWASRL |
| | | | | RAPTSTEANHIRLSCLAVGLAKKKRCVLMYGSLPSFHAIMGPL |
| | | | | RALLTDHLADCSHPQELQELCQSTLTEMESQKQLCRPLTCEKS |
| | | | | KPVPLKLFTPRLVKVLEFGRKQGSSKEEQERKRLIHKHKREFK |
| | | | | GAVREIRKDNQFLARMQLSEIMERDAERKRKVKQLFNSLATQE |
| | | | | GEWKALKRKKFKK |
| 476 | 1215 | 3 | 961 | LTKQEDCCGSIGTAWGQSKCHKCPQLQYTGVQKPGPVRGEVGA |
| | | | | DCPQGYKRLNSTHCQDINECAMPGVCRHGDCLNMPGSYRCVCP |
| | | | | PGHSLGPSRTQCIADKPEEKSLCFRLVSPEHQCQHPLTTRLTR |
| | | | | QLCCCSVGKAWGARCQRCPTDGTAAFKEICPAGKGYHILTSHQ |
| | | | | TLTIQGESDFSLFLRPDGPPKPQQLPESPSQAPPPEDTEEERG |
| | | | | VTTDSPVSEERSVQQSHPTATTTPARPYPELISRPSPPTMRWF |
| | | | | LPDLPPSRSAVEIAPTQVTETDECRLNQNICGHGECVPGPPDY |
| | | | | SCECNPGYRSRPQHRYCV |
| 477 | 1216 | 3652 | 1207 | MAGGHCGSFPAAAAGSGEIVQLNVGGTRFSTSRQTLMWIPDSF |
| | | | | FSSLLSGRISTLRDETGAIFIDRDPAAFAPILNFLRTKELDLR |
| | | | | GVSINVLRHEAEFYGITPLVRRLLICEELERSSCGSVLFHGYL |
| | | | | PPPGIPSRKINNTVRSADSRNGLNSTEGEARGNGTQPVLSGTG |
| | | | | EETVRLGFPVDPRKVLIVAGHHIWIVAAYAHFAVWYRIKESSG |
| | | | | WQQVFTSPYLDWTIERVALNAKVVGGPHGDKDKMVAVASESSI |
| | | | | ILWSVQDGGSGSEIGVFSLGVPVDALFFIGNQLVATSHTGKSG |
| | | | | VWNAVTQHWQVQDVVPITSYDTAGSFLLLGRNNGSIYYIDMQK |
| | | | | FPLRMKDNDLLVTELYHDPSNDAITALSVYLTPKTSVSGNWIE |
| | | | | IAYGTSSGAVRVIVQHPETVGSGPQLFQTFTVHRSPVTKIMLS |
| | | | | EKHLVSVCADNNHVRTWTVTRFRGMISTQPGSTPLASFKILSL |
| | | | | EETESHGSYSSGNDIGPFGERDDQQVFIQKVVPITNKKFVRLS |
| | | | | STGKRICEIQAVDCTTISSFTGRECEGSSRMGSRPRRYLFTGH |
| | | | | TNGSIQMWDLTTAMDMVNKSEDKDVGGPTEEELLKLLDQCDLS |
| | | | | TSRCATPNISPATSVVQHSHLRESNSSLQLQHHDTTHEAATYG |
| | | | | SMRPYRESPLLARARRTESFHSYRDFQTINLNRNVERAVPENG |
| | | | | NLGPIQAEVKGATGEcNISERKSPGVEIKSLRELDSGLEVHKI |
| | | | | AEGFSESKKRSSEDENENKIEFRKKGGFEGGGFLGRKKVPYLA |
| | | | | SSPSTSDGGTDSPGTASPSPTKTTPSPRHKKSDSSGQEYSL |
| 478 | 1217 | 1 | 1379 | RRPTRPILTDELFKRTIQLPHLKTLILNGNKLETLSLVSCFAN |
| | | | | NTPLEHLDLSQNLLQHKNDENCSWPETVVNNNLSYNKLSDSVF |
| | | | | RCLPKSIQILDLNNNQIQTVPKETIHLMALRELNIAFNFLTDL |
| | | | | PGCSHFSRLSVLNIEMMFILSPSLDFVQSCQEVKTLNAGRNPF |
| | | | | RCTCELKNFIQLETYSEVMMVGWSDSYTCEYPLNLRGTRLKDV |
| | | | | HKHELSCNTALLIVTIVVIMLVLGLAVAFCCLHFDLPWYLRML |
| | | | | GQCTQTWHRVRKTTQEQLKRNVRFHAFISYSEHDSLNVKNELI |
| | | | | PNLEKEDGSILKKYESYFDPGKSISENIVSFIEKSYKSIFRTL |
| | | | | SPNFVQNEWCHYEFYFAHHNLFHENSDHIILILLEPIPFYCIP |
| | | | | TRYHKLKALLEKKAYLREWPKDRRKCGLFWANLRAINVNVLAT |
| | | | | REMYELQTFTELNEESRGSTISLMRTDCL |
| 479 | 1218 | 1 | 1099 | PTRPPTRPPTRPLLTPSWTSTGRMWSHLNRLLFWSIFSSVTCR |
| | | | | KAVLDCEAMKTNEFPSPCLDSKTKVVMKGQNVSMFCSHKNKSL |
| | | | | QITYSLFRRKTHLGTQDGKGEPAIFNLSITEAHESGPYKCKAQ |
| | | | | VTSCSKYSRDFSFTIVDPVTSPVLNIMVIQTETDRHITLHCLS |
| | | | | VNGSLPINYTFFENHVAISPAISKYDREPAEFNLTKKNPGEEE |
| | | | | EYRCEAKNRLPNYATYSHPVTMPSTGGDSCPFCLKLLLPGLLL |
| | | | | LLVVIILILAFNVLPKYKTRKAMRNNVPRDRGDTANEVGIYAR |
| | | | | ILEKQAKEESVPEVGSRPCVSTAQDEAKRSQELQYATPVFQEV |
| | | | | APREQEACDSYKSGYVYSELNF |
| 480 | 1219 | 1 | 293 | FFFFEERRTGSHSVGHPRMEYSGVSMAHCSKNLLGSSNSPSSA |
| | | | | SQDARTTGACQHAQLIGFFFF\VETASPQVTHAG/LKHLVSRN |
| | | | | PSAVTSQSARIKT |
| 481 | 1220 | 1 | 727 | NREGARKIQNKWLRPSPRSHRTPESVSPERYSYGTSSSSKRTE |
| | | | | GSCRRRRQSSSSANSQQGQWETGSPPTKRRRRSRGRPSGGAKR |
| | | | | RRRGAPAAPQQQSEPARPSSEGKVTCDIRLRVRAEYCEHGPAL |
| | | | | EQGVASRRPQALARQLDVFGQATAVLRSRDLGSVVCDIKFSEL |
| | | | | SYLDAFWGDYLSGALLQALRGVFLTEAKREAVGREAVLLLVSV |
| | | | | DEADYEAGRRRLLLMEEEGGRRPTEAS |
| 482 | 1221 | 1 | 1321 | APNTAELRICRVNIGWGSVRGGDEIFLLCDKVQKDDIEVRFVL |
| | | | | NDWEAKGIFSQADVHRQVAIVFKTPPYCKAITEPVTVKMQLRR |
| | | | | PSDQEVSESMDFRYLPDEKDTYGNKAXKQKTTLLFQKLCQDHV |
| | | | | ETGFRRVDQDGLELLTSGDPPTLASQSAGITVNFPERPRPGLL |
| | | | | GSIGEGRYFKKEPNLFSHDAVVREMPTGVSSQAESYYPSPGPI |
| | | | | SSGLSHHASMAPLPSSSWSSVAHPTPRSGNTNPLSSFSTRTLP |
| | | | | SNSQGIPPFLRIPVGNDLNASNACIYNNADDIVGMEASSMPSA |
| | | | | DLYGISDPNMLSNCSVNMMTTSSDSMGETDNPRLLSMNLENPS |
| | | | | CNSVLDPRNLRQLHQMSSSSMSAGANSNTTVFVSQSDAFEGSD |
| | | | | FSCANNSMINESGPSNSTNPNSHGFVQDSQYSGIGSMQNEQLS |
| | | | | DSFPYEFFQV |
| 483 | 1222 | 1 | 1311 | RRLSLLDLQLGPLGRDPPQECSTFSPTDSGEEPGQLSPGVQFQ |
| | | | | RRQNQRRFSMEDVSKRLSLPMDIRLPQEFLQKLQMESPDLPKP |
| | | | | LSRMSRRASLSDIGFGKLETYVKLDKLGEGTYATVFKGRSKLT |
| | | | | ENLVALKEIRLEHEEGAPCTAIREVSLLKNLKHANIVTLHDLI |
| | | | | HTDRSLTLVFEYLDSDLKQYLDHCGNLMSMHNVKIFMFQLLRG |
| | | | | LAYCHHRKILHRDLKPQNLLINERGELKLADFGRARAKSVPTK |
| | | | | TYSNEVVTLWYRPPDVLLGSTEYSTPIDMWGVGCIHYEMATGR |
| | | | | PLFPGSTVKEELHKINRLLRTPTEETWPGVTAFSEFRTYSFPC |
| | | | | YLPQPLINHAPRLDTDGIHLLSSLLLYESKSRLSAEAAKSHSY |
| | | | | FRSLGERVHQLEDTASIFSLKEIQLQKDPGYRGLAFQQPGRGK |
| | | | | NRRQSIF |
| 484 | 1223 | 807 | 356 | CTPHGSSSSWKIPLWPRHMSPLHSCLPVGTSTSSGPLAVPRDC |
| | | | | FHLCCLWGQLLLISCPLACGQGCRVAGGQQHVPGQALGTLSPL |
| | | | | VSLLTWAGPSLDWPHPGSLVTPRCPILPAVPVLVKGLGGWPPT |
| | | | | RPSRAAPVSGPWDQLPYFPGL |
| 485 | 1224 | 1199 | 370 | LISPVWGNIQRSRSVPLFPSGLVLGGIWARGPLLAKLASFNII |
| | | | | SVLNAECYLKQILHPTSHFTVSETPPLSGNDTDSLSCDSGSSA |
| | | | | TSTPCVSRLVTGHHLWASKNGRHVLGLIEDYEALLKQISQGQR |
| | | | | LLAERDIQTQEAPSSTSQELGTKGPHPAPLSKFVSSVSTAKLT |
| | | | | LEEAYRRLKLLWRVSLPEDGQCPLHCEQIGEMKAEVTKLHKKL |
| | | | | FEQEKKLQNTMKLLQLSKRQEKVIFDQLVVTHKILRKARGNLE |
| | | | | LRPGGAHPGTCSPSRPGS |
| 486 | 1225 | 2469 | 1660 | LGLFCILPIDTLCAVLERDTLSIRESRLFGAVVRWAEAECQRQ |
| | | | | QLPVTFGNKQKVLGKALSLIRFPLMTIEERAAGPAQSGILSDR |
| | | | | EVVNLFLHFTVNPKPRVEYIDRPRCCLRGKECCINRFQQVESR |
| | | | | WGYSGTSDIRLFTVNPRISIVGFGLYGSIHGPTDYQVNIQIIE |
| | | | | YEKKQTLGQNDTGFSCDGTANTFRVMFKEPIEILPNVCYTACA |
| | | | | TLKGPDSHYGTKGLKKVVHETPAASKTVFFFFSSPGNNNGTSI |
| | | | | EDGQIPEIIFYT |
| 487 | 1226 | 1193 | 372 | SVWWNSEVKDWMQKKRRGLRNSRATAGDIAHYYRDYVVKKGLG |
| | | | | HNFVSGAVVTAVEWGTPDPSSCGAQDSSPLFQVSGFLTRNQAQ |
| | | | | QPFSLWARNVVLATGTFDSPARLGIPGEALPFIHHELSALEAA |
| | | | | TRVGAVTPASDPVLIIGAGLSAADAVLYARHYNIPVIHAFRRA |
| | | | | VDDPGLVFNQLPKMLYPEYHKVHQMMREQSILSPSPYEGYRSL |
| | | | | PRHQLLCFKEDCQAVFQDLEGVEKVFGVSLVLVLIGSHPDLSF |
| | | | | LPGAG\LTLQWILTSR |
| 488 | 1227 | 756 | 1016 | KLRPFIFSNQSLWLHSYEGAELEKTFIKGSWATFWVKVASCWA |
| | | | | CVKLYLGLLLAPLCWPPTQKPQPLILRRRRHRIISPDNKYPPV |
| 489 | 1228 | 1 | 747 | QLIHLSHGYQIHWTDYYNVGTGRPEFGTRAAHKSLAGAELKTL |
| | | | | KDFVTVLAXLFPGRPPVKKLLEMIQEWLASLPLDRIPYNAVLD |
| | | | | LVNNKMRISGIFLTNHIKWVGCQGSRSELRGYPCSLWKLFHTL |
| | | | | TVEASTHPDALVGTGFEDDPQAVLQTMRRYVHTFFGCKECGEH |
| | | | | FEEMAKESMDSVKTPDQAILWLWKKHNMVNGRLAGEKPLGMGG |
| | | | | SARAEGGPGPGTARTARKPWGLSLSFAASCHPLC |
| 490 | 1229 | 4797 | 2398 | HGGATFINAFVTTPMCCPSRSSMKTGKYVHNHNVYTNNENCSS |
| | | | | PSWQANHEPRTFAVYLNNTGYRTAFFGKYLNEYNGSYIPPGWR |
| | | | | EWLGLIKNSRFYNYTVCRNGIKEKHGFDYAKDYFTDLITNESI |
| | | | | NYFKMSKRMYPHRPVMMVISHAEPHGPEDSAPQFSKLYPNASQ |
| | | | | HITPSYNYAPNNDKHWIMQYTGPMLPIHMEFTNILQRKRLQTL |
| | | | | MSVDDSVERLYNMLVETGELENTYIIYTRDHGYHIGQFGLVKG |
| | | | | KSMPYDFDIRVPFFIRGPSVEPGSIVPQIVLNIDLAPTILDIA |
| | | | | GLDTPPDVDGKSVLKLLDPEKPGNRFRTNKKAKIWRDTFLVER |
| | | | | GKFLRKKEESSKNIQQSNHLPKYERVKELCQQARYQTACEQPG |
| | | | | QKWQCIEDTSGKLRIHKCKGPSDLLTVRQSTRNLYARGFHDKD |
| | | | | KECSCRESGYRASRSQRKSQRQFLRNQGTPKYKPRFVHTRQTR |
| | | | | SLSVEFEGEIYDINLEEEEELQVLQPRNIAKRHDEGHKGPRDL |
| | | | | QASSGGNRGRMLADSSNAVGPPTTVRVTHKCFILPNDSIHCER |
| | | | | ELYQSARAWKDHKAYIDEEIEALQDKIKNLREVRGHLKRRKPE |
| | | | | ECSCSKQSYYNKEKGVKKQEKLKSHLHPFKEAAQEVDSKKQLF |
| | | | | KENNRRRKKERKEKRRQRKGEECSLPGLTCFTHDNNHWQTAPF |
| | | | | WNLGSFCACTSSNNNTYWCLRTVNETHNFLFCEFATGFLEYFD |
| | | | | MNTDPYQLTNTVHTVERGILNQLHVQLMELRSCQGYKQCNPRP |
| | | | | KNLDVGNKDGGSYDLHRGQLWDGWEG |
| 491 | 1230 | 2480 | 385 | HLLIAQELADRVGEGRACWSLGNAYVSMGRPAQALTFAKKHLQ |
| | | | | ISQEIGDRHGELTARMNVAQLQLVLGRLTSPAASEKPDLAGYE |
| | | | | AQGARPKRTQRLSAETWDLLRLPLEREQNGDSHHSGDWRGPSR |
| | | | | DSLPLPVRSRKYQEGPDAERRPREGSHSPLDSADVRVHVPRTS |
| | | | | IPRAPSSDEECFFDLLTKFQSSRMDDQRCPLDDGQAGAAEATA |
| | | | | APTLEDRIAQPSMTASPQTEEFFDLIASSQSRRKDDQPASVGS |
| | | | | LPGLRITHSNAGHLRGHGEPQEPGDDFFNNLIKYQSSPIDDQR |
| | | | | CPPPDVLPRGPTMPDEDFFSLIQRVQAKRNDEQRVDLAGGPGA |
| | | | | GGRRPARAPAAVPAWCELRPCAHPQAHPAPTPGRRSHSHSHVL |
| | | | | PRPLPRTGTGHAAPRPPRPRATGSGQAARGGRACFHPGLAPMA |
| | | | | LSFLPSAPAAGRTGPSACRPRPGAVRLPHPLPQALPVLPCPAK |
| | | | | CETLLSPSPSPKVSLSRLLGPPRTGPCSVPPELVLGWPCDRRA |
| | | | | PPLQLRPGAGLPPSLSPHSPARGQQPQKAPQTTHGRPGCSGSP |
| | | | | EVPPAESQGPAGASTGAGPISKAEGMAGHELPHSKTPSQEKGQ |
| | | | | GLVLGMLTGSKSSAQSGWEVAPGSVTLTQVGGWSVEAGEASLS |
| | | | | STLQTPHMRTPLLPPAGGDDITAKSMGRGLTGHQVRDPRTGRT |
| | | | | CWSLRWAPGA |
| 492 | 1231 | 3 | 398 | NSAADLAIFALWGLKPVVYKLASSFLGLGLHPISGHFVAEHYM |
| | | | | FLKGHETYSYYGPLNWITFRVGYHVEHHDFPSIPGYNLPLVRK |
| | | | | IAPEYYDHLPQHHSWVKVLWDFVFEDSLGPYARVKRVYRLAKD |
| | | | | GL |
| 493 | 1232 | 1 | 214 | QESGFSCKGPGQNVAVTRAHPDSQGRRRRPERGARGGQVFYNS |
| | | | | EYGELSEPSEEDHCSPSARVTFFTDNSY |
| 494 | 1233 | 3 | 443 | VIVHARPIRTRASKYYIPEAVYGLPAYPAYAGGGGFVLSGATL |
| | | | | HRLAGACAQVELFPIDDVFLGMCLQRLRLTPEPHPAFRTFGIP |
| | | | | QPSAAPHLSTFDPCFYRELVVVHGLSAADIWLMWRLLHGPHGP |
| | | | | ACAHPQPVAAGPFQWDS |
| 495 | 1234 | 1 | 897 | MASAACSMDPIDSFELLDLLFDRQDGILRHVELGEGWGHVKDQ |
| | | | | VLPNPDSDDFLSSILGSGDSLPSSPLWSPEGSDSGISEDLPSD |
| | | | | PQDTPPRSGPATSPAGCHPAQPGKGPCLSYHPGNSCSTTTPGP |
| | | | | VIQQQHHLGASYLLRPGAGHCQELVLTEDEKKKLAKEGITLPT |
| | | | | QLPLTKYEERVLKKIRRKIRNKQSAQESRKKKKEYIDGLETRS |
| | | | | CCCPLPSSSSPPSALLAPTKPRALGTLRLYECSPELCTTMLPP |
| | | | | AWLLMLCQAPRPQDPDPRLTQPEKSLQEAPGQTGASRTPRT |
| 496 | 1235 | 4235 | 940 | ARGRRSRPVWAASWGGRGRPAARRRPRGLAATMGFELDRFDGD |
| | | | | VDPDLKCALCHKVLEDPLTTPCGHVFCAGCVLPWVVQEGSCPA |
| | | | | RCRGRKSAKELNHVLPLKRLILKLDIKCAYATRGCGRVVKKQQ |
| | | | | LPEHLERCDFAPARCRHAGCGQVLLRRDVEAHMRDACDARPVG |
| | | | | RCQEGCGLPLTHGEQRAGGHCCARALRAHNGALQARLGAIHKA |
| | | | | LKKEALRAGKREKSLVAQLAAAQLELQMTALRYQKKFTEYSAR |
| | | | | LDSLSRCVAAPPGGKGEETKSLTLVLHRDSGSLGFNIIGGRPS |
| | | | | VDNHDGSSSEGIFVSKIVDSGPAAKEGGLQIHDRIIEVNGRDL |
| | | | | SRATHDQAVEAFKTAKEPIVVQVLRRTPRTKMFTPPSESQLVD |
| | | | | TGTQTDITFEHIMALTKMSSPSPPVKDPYLLPEEHPSAHEYYD |
| | | | | PNDYTGDIHQEMDREELELEEVDLYRNNSQDKLGLTVCYRTDD |
| | | | | EDDIGIYISEIDPNSIAAKDGRIREGDRIIQINGIEVQNREEA |
| | | | | VALLTSEENKNFSLLIARAELQLDEGWMDDDRNDFLDDLHMDM |
| | | | | LEEQHHQAMQFTASVLQQKKHDEDGGTTDTATILSNQHEKDSG |
| | | | | VGRTDESTPNDESSEQENNGDDATASSNPLAGQRKLTCSQDTL |
| | | | | GSGDLPFSNKSFISPECTGAAYLGIPVDECERFRELLELKCQV |
| | | | | KSATPYGLYYPSGPLDAGKSDPESVDKELELLNEELRSIELEC |
| | | | | LSIVRAHKMQQLKEQYRESWMLHNSGFRNYNTSIDVRRBELSD |
| | | | | ITELPEKSDKDSSSAYNTGESCRSTPLTLEISPDNSLRRAAEG |
| | | | | ISCPSSEGAVGTTEAYGPASKNLLSITEDPEVGTPTYSPSLKE |
| | | | | LDPNQPLESKERPASDGSRSPTPSQKLGSAYLPSYHHSPYKHA |
| | | | | HIPAHAQHYQSYMQLIQQKSAVEYAQSQMSLVSMCKDLSSPTP |
| | | | | SEPRMEWKVKIRSDGTRYITKRPVRDRLLRERALKIREERSGM |
| | | | | TTDDDAVSEMKMGRYWSKEERKQHLVKAKEQRRRREFMMQSRL |
| | | | | DCLKEQQAANDRKEMNILELSHKKMMKKRNKKIFDNWMTIQEL |
| | | | | LTHGTKSPDGTRVYNSFLSVTTV |
| 497 | 1236 | 2 | 157 | FFFLVEMGFCHVGQGGLTLIGSSNLPASASKSAGITGVSHCAR |
| | | | | PDFKSCVE |
| 498 | 1237 | 1 | 211 | LAGRKVLLFVSGRVVGWGPITWLLMSEVKPLRARGVASGLCVL |
| | | | | ASWLTAFVLTKSFLPGGVSVQPQAPGP |
| 499 | 1238 | 2 | 345 | FWAPGPPGVGAAVGDASTRSLRESCPSPSPGRLRRTTAPWSSQ |
| | | | | ARAAAPAPSSSCRGPDGASSPRDLPWRPWKILRRTPLSGDVEL |
| | | | | SQVHPDQRILRRFILSRTCGNTIPGMAE |
| 500 | 1239 | 1 | 523 | MRRFLSKVYSFPMRKLILFLVFPVVRQTPTQHFKNQFPAKHWE |
| | | | | HELGLAFTKNRMNYTNKFLLIPESGDYFIYSQVTFRGMTSECS |
| | | | | EIRQAGRPNKPDSITVV1TKVTDSYPEPTQLLMGTKSVCEVGS |
| | | | | NWFQPIYLGAMFSLQEGDKLMVNVSDISLVDYTKEDKTFFGAF |
| | | | | LL |
| 501 | 1240 | 2 | 1277 | FVWDEVAQRSGCEERWLVIDRKVYNISEFTRRHPGGSRVISHY |
| | | | | AGQDATDPFVAFHINKGLVKKYMNSLLIGELSPEQPSFEPTKN |
| | | | | KELTDEFRELRATVERMGLMKANHVFFLLYLLHILKLDGAAWL |
| | | | | TLWVFGTSFLPFLLCAVLLSAVQAQAGWLQHDFGHLSVFSTSK |
| | | | | WNHLLHHFVIGHLKGAPASWWNHMHFQHHAKPNCFRKDPDINM |
| | | | | HPFFFALGKILSVELGKQKKKYMPYNHQHKYFFLIGPPALLPL |
| | | | | YFQWYIFYFVIQRKKKVDLAWMITFYVRFFLTYVPLLGLKAFL |
| | | | | GLFFIVRFLESNWFVWVTQMNHIPMHIDHDRNMDWVSTQLQAT |
| | | | | CNVHKSAFNDWFSGHLNFQIEHHLFPTMPRHNYHKVAPLVQSL |
| | | | | CAKHGIEYQSKPLLSAFADIIHSLKESGQLWLDAYLHQ |
| 502 | 1241 | 999 | 540 | QCGGIPYNTTQFLMNDRDPEEPNLDVPHGISHPGSSGESEAGD |
| | | | | SDGRGRAHGEFQRKDFSETYERFHTESLQGRSKQELVRDYLEL |
| | | | | EKRLSQAEEETRRLQQLQACTGQQSCRQVEELAAEVQRLRTEN |
| | | | | QRLRQENQMWNREGCRCDEEPGT |
| 503 | 1242 | 1448 | 875 | SPERSSLSVGREKAMEVPPPAPRSFLCRALCLFPRVFAAEAVT |
| | | | | ADSEVLEERQKRLPYVPEPYYPESGWDRLRELFGKD\VTGSLF |
| | | | | RINVGLRGLVAGGIIGALLGTPVGGLLMAFQKYSGETVQERLQ |
| | | | | KDRKALHELKLEEWKGRLQVTEHLPEKIESSLQEDEPENDAKK |
| | | | | IEALLNLPRNPSVIDKQDKD |
| 504 | 1243 | 149 | 1293 | RSLGLAVTEMVPWVRTMGQKLKQRLRLDVGREICRQYPLFCFL |
| | | | | LLCLSAASLLLNRYIHILMIFWSFVAGVVTFYCSLGPDSLLPN |
| | | | | IFFTIKYKPKQLGLQELFPQGHSCAVCGKVKCKRHRPSLLLEN |
| | | | | YQPWLDLKISSKVDASLSEVLELVLENFVYPWYRDVTDDESFV |
| | | | | DELRITLRFFASVLIRRIHKVDIPSIITKKLLKAAMKHIEVIV |
| | | | | KARQKVKNTEFLQQAALEEYGPELHVALRSRRDELHYLRKLTE |
| | | | | LLFPYILPPKATDCRSLTLLIREILSGSVFLPSLDFLADPDTV |
| | | | | NHLLIIFIDDSPPEKATEPASPLVPFLQKFAEPRNKKPSVLKL |
| | | | | ELKQLEQQDLLFRFMNFLKQEGAVHVLHVLFDCGGI |
| 505 | 1244 | 2 | 1116 | QSLAEVLQQLGASSELQAVLSYIFPTYGVTPNHSAFSMHALLV |
| | | | | LHYMKGGFYPRGVTSEIAFHTIPVIQRAGGAVLTKATVQSVLL |
| | | | | DSAGKACGVSVKKGHELVNIYCPIVVSNAGLFNTYEHLLPGNA |
| | | | | RCLPGVKQQLGTVRPGLGMTSVFICLRGTKEDLELPSTNYYVY |
| | | | | YDTDMDQAMERYVSMPREEAAEHIPLLFFAFPSAKDPTWEDRF |
| | | | | PGRSTMIMLIPTAYEWFEEWQAELKGK\RGSDYETFKNSFVEA |
| | | | | SMSVVLKLFPQLEGKVESVTAGSPLTNQFYL\AAPRGACYGAD |
| | | | | HDLGRLHPCVMASLRAQSPIPNLYLTGQDIFTCGLVGALQGAL |
| | | | | LCSSTILINLYSDLKNLDSRLAQKKKN |
| 506 | 1245 | 1759 | 873 | RPQETRVLQVSCGRAHSLVLTDREGVFSMGNNSYGQCGRKVVE |
| | | | | NEIYSESHRVHRMQDFDGQVVQVACGQDHSLFLTDKGEVYSCG |
| | | | | WGADGQTGLGHYNITSSPTKLGGDLAGVNVIQVATYGDCCLAV |
| | | | | SANGGLFGWGNSEYLQLASVTDSTQVNVPRCLHFSGVGKVRQA |
| | | | | ACGGTGCAVLNGEGHVFVWGYGILGKGPNLVESAVPEMIPPTL |
| | | | | FGLTEFNPEIQVSRIRCGLSHFAALTNKGELFVWGKNIRGCLG |
| | | | | IGRLEDQYFPWRVTMPGEPVDVACGVDHMVTLAKSFI |
| 507 | 1246 | 520 | 2 | LPFREWLMIVVSLSAAAVAAAFMAKCRLVLSSRYFCSHFVMSA |
| | | | | SRARIRSSFSRTSSRRAGALYSGMLAGWPFPCFCWVLSASSSL |
| | | | | SSQVRSLRSICSRFSHADCSWVRACCSFSTFSTYACFSRNSSS |
| | | | | SLMTLAWALLKAWSRISMCLRWSSLAVRTAANSISNFSFSFKN |
| 508 | 1247 | 1 | 1083 | MQAVRATASQSLSCARAPREPTQHALRAHWFPPAAAVQPSPHS |
| | | | | GVAAAAGTWSSAFRGEHPLVSSGLLLGVREQSFRLLRSKAGTH |
| | | | | MYLEHTSHCPHHDDDTAMDTPLPRPRPLLAVERTGQRPLWAPS |
| | | | | LELPKPDMQPLPAGAFLEEVAEGTPAQTESEPKVLDPEEDLLC |
| | | | | IAKTFSYLRESGWYWGSITASEARQHLQKMPEGTFLVRDSTHP |
| | | | | SYLFTLSVKTTRGPTNVRIEYADSSFRLDSNCLSRPRILAFPD |
| | | | | VVSLVQHYVASCTADTRSDSPDPAPTPAKPMPKEDAPSDPAKP |
| | | | | APPPATAVHLKLVQPFVRRSSARSLQHLCRLVINRLVADVDCL |
| | | | | PLPRRMADYLRQYPFQL |
| 509 | 1248 | 2 | 841 | FVDIFQRWKECRGKSPAQAELSYLNKAXWLEMYGVDMHVVRGR |
| | | | | DGCEYSLGLTPTGILIFEGANKIGLFFWPKITKMDFKKSKLTL |
| | | | | VVVEDDDQGREQEHTFVFRLDSARTCKHLWKCAVEHHAFFRLR |
| | | | | TPGNSKSNRSDFIRLGSRFRFSGRTEYQATHGSRLRRTSTFER |
| | | | | KPSKRYPSRRHSTFKASNPVIAAQLCSKTNPEVHNYQPQYHPN |
| | | | | IHPSQPRWHPHSPNVRPSFQDDRSHWKASASGDDSHFDYVHDQ |
| | | | | NQKNKGGMQSMMYRDKLMTAK |
| 510 | 1249 | 2 | 763 | GGIRLIQKLTWRSRQQDRENCAMKGKHKDECHNFIKVFVPRND |
| | | | | EMVFVCGTNAFNPMCRYYRVSIFYVICFF*STFLPSLICC*5* |
| | | | | NLSAFQ*FVLSLVQ*KNKDRILQMEF*YK*NSIAFKRAR*IDM |
| | | | | TLAIYFSFV\LSTL*YDGEEISGLARCPFDARQTNGALFADGK |
| | | | | LYSATVADFLASDAVIYRSMGDGSALRTIKYDSKWIKE/PHFL |
| | | | | YAIK/Y/GNYVYFSFREIVAT**LG/KAVDS/RVARYEKQLVG |
| | | | | PTV |
| 511 | 1250 | 1555 | 629 | ARALARERESESARADDVTLGVSAILAVDRGGNLGSA\DGWAY |
| | | | | IDVEVRRPWAFVGPGCSRSSGNGSTAYGLVGSPRWLSPFHTGG |
| | | | | AVSLPRRPRGPGPVLGVARPCLRCVLRPE\HYEPGSHYSGFAG |
| | | | | RDASRAFVTGDCSEAGLVDDVSDLSAAEMLTLHNWLSFYEKNY |
| | | | | VCVGRVTGRFYGEDGLPTPALTQVEAAITRGLEANKLQLQEKQ |
| | | | | TFPPCNAEWSSARGSRLWCSQKSGGVSRDWIGVPRKLYKPGAK |
| | | | | EPRCVCVRTTGPPSGQMPDNPPRRNRGDLDHPNLAEYTGCPPL |
| | | | | AITCSFPL |
| 512 | 1251 | 1100 | 798 | YFIICRDGVLLFCPGWSQTPGAQAILLHWATQNAGMTDMSHSA |
| | | | | QPIYLFIYLIRTRSHYVAQAGQLLDSNDSPNVASQNVGITGMS |
| | | | | HHAWLKIVLYFCII |
| 513 | 1252 | 3 | 1395 | PAARPPSLVRLSPSPPKPRARARAPQSVEPAAPLVARGSSPPA |
| | | | | RPAPAVRPRRAPYRSGAGGPLGGRGRPPIRPLVVRAVRSRSWP |
| | | | | ASPRGPQPPR\IRARSAPPMEGARVFGALGPIGPSSPGLTLGG |
| | | | | LAVSEHRLSNKLLAWSGVLEWQEKPRPYSDSTAKLKRTLPCQA |
| | | | | YVNQGENLETDQWPQKLIMQLIPQQLLTTLGPLFRNSQLAQFH |
| | | | | FTNRDCDSLKGLCRIMGNGFAGCMLFPRISPCEVRVLMLLYSS |
| | | | | KKKIFMGLIPYDQSGFVSAIRQVITTRKQAVGPGGVMSGPVQI |
| | | | | VNNKFLAWSGVMEWQEPRPEPNSRSKRWLPSHVYVNQGEILRT |
| | | | | EQWPRKLYMQLIPQQLLTTLVPLFLNSRLVQFHFTKDLETLKS |
| | | | | LCRIMDNGFAGCVHFSYKASCEIRVLMLLYSSEKKIFIGLIPH |
| | | | | DQGNFVNGLRVIANQQQVLQRNLEQEQQQRGMGG |
| 514 | 1253 | 320 | 964 | GRPALGREAPPQAGLSSTPPPCSETCTMGPHSILRTVHCRPTK |
| | | | | TPPEPSAEPHPLSLLTSSNTSLAGTSLGRDLTPGGGKPPSGQT |
| | | | | PRNPESPRHRLGSPRGRRWLASPTPTGSGRSGPASRGQRRLSC |
| | | | | AAQDPTSEGASVGAMEAGLGPPTAAPRGVVSEAAESLGGTLSW |
| | | | | GAWGRPPAGPSGLAGRRSRREAKRPDRKEASVMMAAVSAIQP |
| 515 | 1254 | 704 | 107 | PGVPTHGWPRSRVLTRVRGSRGSGKMAAAVVLAAGLRAARRAV |
| | | | | AATGVRGGQVRGAAGVTDGNEVAKAQQATPGGAAPTIFSRILD |
| | | | | KSLPADILYEDQQCLVFRDVAPQAPVHFLVIPKKPIPRISQAE |
| | | | | EEDQQ/LTYVPPLSL*LLGHLLLVAKQTAKAEGLGDGYRLVIN |
| | | | | DGKLGAQSVYHLHIHVLGGRQLQWPPG |
| 516 | 1255 | 2299 | 924 | VPNYLPSVSSAIGGEVPQRYVWRFCIGLHSAPRFLVAFAYWNH |
| | | | | YLSCTSPCSCYRPLCRLNFGLNVVENLALLVLTYVSSSEDF/T |
| | | | | WVPG*GRSGEVFPEGTGLPLPHSDLPTSWCGHSLQCGSQSSFP |
| | | | | PAIHENAFIVFIASSLGHMLLTCILWRLTKKHTVSQE\DGLSL |
| | | | | AGAPRQPRRKSRTSVLRIRVMVRWELSSNGNPGRGVLGLGLGL |
| | | | | GNKKRVVGQNLGL*HCVWVVWETGE*KRWRLQMGIE*GVASRR |
| | | | | Q*VRNSVRGLVCHNSSAPPMYMGFFSPTVFGGGVGG*LHVTFI |
| | | | | LHPPEVEAAGIPLLLGPSLPQRQGREHIVVILAAPACAPFHDR |
| | | | | *WEPREIRPSP*ELGLRGEPTLSYPASCRVIRQPIP*DRKSYS |
| | | | | WKQRLFIINFISFFSALAVYFRHNMYCEAGVYTIFAILEYTVV |
| | | | | LTNMAFHMTAWWDFGNKELLITSQPEEKRF |
| 517 | 1256 | 3 | 254 | IDLLEIRNGPRSHESFQEMDLNDDWKLSKDEVKAYLKKEFEKH |
| | | | | GAVVNESHHDALVEDIFDKEDEDKDGFISAREFTYKHDEL |
| 518 | 1257 | 2 | 611 | PRVRGRVGKEGAAAKPRSLLRRFQLLSWSVCGGNKDPWVQELM |
| | | | | SCLDLKECGHAYSGIVAHQKHLLPTSPPISQASEGASSDIHTP |
| | | | | AQMLLSTLQSTQRPTLPVGSLSSDKELTRPNETTIHTAGHSLA |
| | | | | AGPEAGENQKQPEKNAGPTARTSATVPVLCLLAIIFILTAALS |
| | | | | YVLCKRRRGQSPQSSPDLPVHYIPVAPDSNT |
| 519 | 1258 | 1002 | 418 | LIISNFLKAKQKPGSTPNLQQKKSQARLAPDIVSASQYRKFDE |
| | | | | FQTGILIYELLHQPNPFEVRAQLRERDYRQEDLPPLPALSLYS |
| | | | | PGLQQLAHLLLEADPIKRIRIGEAKRVLQCLLWGPRRELVQQP |
| | | | | GTSEEALCGTLHNWIDMKRALMMMKFAEKAVDRRRGVELEDWL |
| | | | | CCQYLASAEPGALLQSLKLLQLL |
| 520 | 1259 | 2 | 2019 | KRGLIVVMAHEMIGTQIVTERGVALLESGTEKVLLIDSRPFVE |
| | | | | YNTSHILEAININCSKLMKRRLQQDKVLITRLIQHSAKHKVDI |
| | | | | DCSQKVVVYDQSSQDVASLSSDCFLTVLLGKLEKSFNSVHLLA |
| | | | | GGFAEFSRCFPGLCEGKSTLVPTCISQPCLPVANIGPTRILPN |
| | | | | LYLGCQRDVLNKELMQQNGIGYVLNASNTCPKPDFIPESHFLR |
| | | | | VPVNDSFCEKILPWLDKSVDFIEKAKASNGCVLVHCLAGISRS |
| | | | | ATIAIAYIMKPMDMSLDEAYRFVKEKRPTISPNFNFLGQLLDY |
| | | | | EKKIKNQTGASGPKSKLKLLHLEKPNEPVPAVSEGGQKSETPL |
| | | | | SPPCADSATSEAAGQRPVHPASVPSVPSVQPSLLEDSPLVQAL |
| | | | | SGLHLSADRLEDSNKLKRSFSLDIKSVSYSASMAASLHGFSSS |
| | | | | EDALEYYKPSTTLDGTNKLCQFSPVQEL/CGADSRNQS**GGS |
| | | | | Q/PSPRSCRPPGLQTARASDCIRSEPAAVAPPRGPFYLHCIEV |
| | | | | GAWRTITTPASFSAFPP\PAAPHEVCWPGP*GLANPDILAPQT |
| | | | | STPSLTSSWYFATESSHFYSASAIYGGSASYSAYSCSQLPTCG |
| | | | | DQVYSVRRRQKPSDRADSRRSWHEESPFEKQFKRRSCQMEFGE |
| | | | | SIMSENRSREELGKVGSQSSFSGSMEIIEVS |
| 521 | 1260 | 20 | 803 | ASSSKRVSRQKMLQLWKLVLLCGVLTGTSESLKDNLGNDLSNV |
| | | | | VDKLEPVLHEGLETVDNTLKGILEKLKVDLGVLQKSSAWQLAK |
| | | | | QKAQEAEKLLNNVISKLLPTNTDIFGLKISNSLILDVKAEPID |
| | | | | DGKGLNLSFPVTANVTEAGPIIDQIIN\LRASLNLLTAVTIET |
| | | | | DPQTHHPVAGLGECARDPTSISLCLLDKHSQIINKFVNSVINT |
| | | | | LKSTVSSLLQKEKPLLIFIHSLDVNVIQQVVDNPQHKTQLQ |
| | | | | TLI |
| 522 | 1261 | 1246 | 411 | CSLRRPRSAAEPDADHVPLLGLLRLQLFAARQPGAMRPQGPAA |
| | | | | SPQRKRGLLLLLLLQLPAPSSASEIPKGKQKAQLRQREVVDLY |
| | | | | NGMCLQGPAGVPGRDGSPGANGIPGTPGIPGRDGFKGEKGECL |
| | | | | RESFEESWTPNYKQCSWSSLNYGIDLGKIAECTFTKMRSNSAL |
| | | | | RVLFSGSLRLKCPNACCQRWYFTFNGAECSGPLPIEAIIYLDQ |
| | | | | GSPEMNSTINIHRTSSVEGLCEGIGAGLVDVAIWVGTCSDYPK |
| | | | | GDASTGWNSVSRIIIEELPK |
| 523 | 1262 | 2009 | 921 | MHSAMLGTRVNLSVSDFWRVMMRVCWLVRQDSRHQRIRKPHLE |
| | | | | AVVIGRGPETKITDKKCSRQQVQLKAECNKGYVKVKQVGVNPT |
| | | | | SIDSVVIGKDQEVKLQPGQVLHMVNELYPYIVEFEEEAKNPGL |
| | | | | ETHRKRKRSGNSDSIERDAAQEAEAGTGLEPGSNSGQCSVPLK |
| | | | | KGKDAPIKKESLGHWSQGLKISMQDPKMQVYKDEQVVVIKDKY |
| | | | | PKARYHWLVLPWTSISSLKAVAR\EHKELLKIRHTVGEKVIVD |
| | | | | FAGSSKLRFRLGYHRIPSMSHVHLHVISQDFDSPCLKNKKHWN |
| | | | | SFNTEYFLESQAVIEMVQEAGRVTVRDGMPELLKLPLRCRECQ |
| | | | | QLLPSIPQLKEHLRKHWTQ |
| 524 | 1263 | 2067 | 198 | DMSDTSESGAGLTRFQAEASEKDSSSMMQTLLTVTQNVEVPET |
| | | | | PKASKALEVSEDVKVSKASGVSKATEVSKLPEAREAPATQASS |
| | | | | TTQLTDTQVLAAENKSLAANTKKQNANPQAVTMPATETKKVSH |
| | | | | VANTKVNTKAQETEAAPSQAPANEPEPESAAAQSQENQDTRPK |
| | | | | VKAKKARKVKHLDGEEDGSSDQSQASGTTGGRRVSKALMASMA |
| | | | | RPASRGPIAFWARRASRTRLACFGPGEPLLSPWRSP\KARRQR |
| | | | | GFAVRVAKFQ\SSQEPEAPPPW\DVALLQGRAN\DLVKYLLAK |
| | | | | DQTKIPIKRS\DMLKDIIKEYTDVYPEII\ERAGYSLE\KVFG |
| | | | | IQLKEIDKNDHLYILLSTLEPTDAGILGTTKDSPKLGLLMVLL |
| | | | | SIIFVRNGNRS\SEAVIWEVLR/RSLGLRLGIHHS\LLGDVK\ |
| | | | | KLITNEV\VKQKYL\DYARVPHSNSP\EYEFFWG\LRSYYEDQ |
| | | | | QR*KSFKFACK\VQK\KDPK\EWAAQSPPGKAR/ERMEAN\LK |
| | | | | AAS*GSPWKPRLRAEIKARMGIGLGSENAAGPCNWDEADIGPW |
| | | | | AKARIQAGAEAKAKAQESGSASTGASTSTNNSASASASTSGGF |
| | | | | SAGASLTATLTFGLFAGLGGAGASTSGSSGACGFSYK |
| 525 | 1264 | 1 | 1397 | ARPPVCTGSTMSLTVVSMACVGFFLLQGAWPLMGGQDKPFLSA |
| | | | | RPSTVVPRGGHVALQCHYRRGFNNFMLYKEDRSHVPIFHGRIF |
| | | | | QESFIMGPVTPAHRGTYRCRGSRPHSLTGWSAPSNPLVIMVTG |
| | | | | NHRKPSLLAHPGPLLKSGETVILQCWSDIMFEHFFLHKEGISK |
| | | | | DPSRLVGQIHDGVSKANFSIGPMMLALAGTYRCYGSVTHTPYQ |
| | | | | LSAPSDPLDIVVTGPYEKPSLSAQPGPKVQAGESVTLSCSSRS |
| | | | | SYDMYHLSREGGAHERRLPAVRKVNRTFQADFPLGPATHGGTY |
| | | | | RCFGSFRHSPYEWSDPSDPLLVSVTGNPSSSWPSPTEPSSKSG |
| | | | | NLRHLHILIGTSVVKIPFTILLFFLLHRWCSNKK\NAAVMDQE |
| | | | | PAGNR\VMSEDSDEQDHQEVSYP*LEHCVFTQRXITRPSQRPK |
| | | | | TPPTDTSMYIELPNAEPRSKVVFCPRAPQSGLEGIF |
| 526 | 1265 | 6657 | 988 | LHNLRERYFSGLIYTYSGLFCVVVNPYKHLPIYSEKIVDMYKG |
| | | | | KKRHEMPPHIYAIADTAYRSMLQDREDQSILCTGESGAGKTEN |
| | | | | TKKVIQYLAVVASSHKGKKDTSITGELEKQLLQRNPILEAFGN |
| | | | | AKTVKNDNSSRFGKFIRINFDVTGYIVGANIETYLLEKSPAIR |
| | | | | QARDERTFHIFYYMIAGAKEKMRSDLLLEGFNNYTFLSNGFVP |
| | | | | IPAAQDDEMFQETVEALAIMGFSEEEQLSILKVVSSVLQLGNI |
| | | | | VFKKERNTDQASMPDNTAAQKVCHLMGINVTDFTRSILTPRIK |
| | | | | VGRDVVQKAQTKEQADFAVEALAKATYERLFRWILTRVNKALD |
| | | | | KTHRQGASFLGILDIAGFEIFEVNSFEQLCINYTNEKLQQLFN |
| | | | | HTMFIL\EQEEYQREGIEWNFIDFGLDLQPCIELIERPNNPPG |
| | | | | VLALLDEECWFPKATDKSFVEKLCTEQGSHPKFQKPKQLKDKT |
| | | | | EFSIIHYAGKVDYNASAWLTKNNDPLNDNVTSLLNASSDKFVA |
| | | | | DLWKDVDRIVGLDQMAKMTESSLPSASKTKKGMFRTVGQLYKE |
| | | | | QLGKLMTTLRNTTPNFVRCIIPNHEKRSGKLDAFLVLEQLRCN |
| | | | | GVLEGIRICRQGFPNRIVFQEFRQRYEILAANAIPKGFMDGKQ |
| | | | | ACILMIKALELDPNLYRIGQSKIFFRTGVLAHLEEERDLKITD |
| | | | | VIMAFQAMCRGYLARKAFAKRQQQLTAMKVIQRNCAAYIKLRN |
| | | | | WQWCRLFTKV*PLLQVTRQE*EMQAKEDELQKTKERQQKAENE |
| | | | | LKELEQKHSQLTEEKNLLQEQLQAETELYAEAEEMRVRLAAKK |
| | | | | QELEEILHEMEARLEEEEDRGQQLQAERKKMAQQMLDLEEQLE |
| | | | | EEEAARQKLQLEKVTAEAKIKKLEDEILVMDDQNNKLSKERKL |
| | | | | LEERISDLTNNLAEEEEKAKNLTKLKNKHESMISELEVRLKKE |
| | | | | EKSRQELEKLKRKLEGDASDFHEQIADLQAQIAELKMQLAKKE |
| | | | | EELQAALARLDDEIAQKNNALKKIRELEGHISDLQEDLDSERA |
| | | | | ARNKAEKQKRDLGEELEALKTELEDTLDSTATQQELRAKREQE |
| | | | | VRVLKR\ALNEETRSHEAQVQEMRQKHAQAVQSLTEQLEQ\*K |
| | | | | RAKANLDKNKQTLEKENTD\LAGELRVLGQA\KQEVEHRMKKL |
| | | | | QAQVQELQSKCSDGERARAELNDKVHK\LQNEVESVTG\MLNE |
| | | | | AEGKAIKLAKDVASLSSQL\QDTQELLQEESRQKLNVST\SLR |
| | | | | \QLEEERNSLQDQLDEEMEAKQNLERHISTLNIQLSDSKKKLQ |
| | | | | DFASTVEALEEGKKRFQKEIENLTQQYEEKAAAYDKLEKTKNR |
| | | | | LQQELDDLVVDLDNQRQLVSNLEKKQRKFDQLLAEEKNISSKY |
| | | | | ADERDRVEAEAREKETKALSL\ARALEEALEAKEELERTNKML |
| | | | | KA\EMGRPGSASKD\DVGQELSHDL\EKSK\RALGDPRLEEMK |
| | | | | T\QLEELGRTELASPRRDA\KLRLEVNMQAPSRASFER\DLQA |
| | | | | RTEQNE\ESRR\HLQRQLHEYETELEDERKQRALAAAAKIKLG |
| | | | | WDPVRTLDL*ADSAIKGRGGKAIKQLRKKQAQMKDFQRELEDA |
| | | | | \RASRDEIF\ATA\KENEKKAKSLEA\DLMQLQE\DLAREREG |
| | | | | RKQ\ADLE\KEELAEEL\ASSLSGRNALQDEKRRLEARIQQLE |
| | | | | EELEEEQGNMEAMSDRVRKATQQAEQLSNELATERSTAQKNES |
| | | | | ARQQLERQNKELRSKLHEMEGAVKSKFKSTIAALEAKIAQLEE |
| | | | | QVEQEAREKQAATKSLKQKDKKLKEILLQVEDERKMAEQYKEQ |
| | | | | AEKGNARVKQLKRQLEEAEEESQRINANRRKLQRELDEATESN |
| | | | | EAMGREVNALKSKLRRGNETSFVPSRRSGGRRVIENADGSEEE |
| | | | | TDTRDADFNGTKASE |
| 527 | 1266 | 1 | 775 | KLHFAKSLNSELSCSTREAMQDEDGYITLNIKTRKPALVSVGP |
| | | | | ASSSWWRVMALILLILCVGMVVGLVAKGIWSVMQRNYLQDENE |
| | | | | NRTGTLQQLAKRFCQYVVKQSELKGTFKGRKCSPCDTNWRYYG |
| | | | | DSCYGFFRHNLTWEESKQYCTDMNATLLKIDNRNIVEYIKAR\ |
| | | | | THLIRWVGLSRQKSNEVWKWEDGSVISENMFEFLEDGKGNMNC |
| | | | | AYFHNGKMHPTFCENKHYL\MCE\RKAGHDPRWTQLPLMPKRW |
| | | | | TG |
| 528 | 1267 | 1053 | 424 | NQGLRDVGLCRTCLVNKIFASSILGKSHHHSLVSINQGHNAPW |
| | | | | KAAGS\LPLKAAYC\QGFSPCDCLKYG\SWDEKDLMVPQPDTH |
| | | | | KGSVLRWISKRGKPLAVEMEEGHCL\CLPLGTECLGVKP\IVH |
| | | | | LFNSEMGEK\RPVAG\ARRVGSSAALLFFTPLRCLGGEKHKSG |
| | | | | LRARPGIVPSLELNYDIDSFAHMFF/SVDLLLIITLLSYYIPF |
| | | | | C |
| 529 | 1268 | 1435 | 1560 | MWWRLAPTQAIWRAAGCCMRFSRRRSTCCCLASCIFLKYKIVR |
| | | | | GDQPAAKRRQRRRPAAPSAPPQAARKHPPPKKRRFDGVQDPAR |
| | | | | YSWAINGKVFDVTQRPANFLRGPRGPETLSDWESQFTFKYHHV |
| | | | | GKLLKEGEEPTVYSDEEEPKDESARKND* |
| 530 | 1269 | 705 | 166 | GPRMAKFLSQDQINEYKECFSLYDKQQRGKIKATDLMVAMRCL |
| | | | | GASPTPGEVQRHLQTHGIDGNGELDFSTFLTIMHMQIKQEDPK |
| | | | | KEILLAMLMVDKEKLGYVMASDLRSKLTSLGEKLTHKEV\DDL |
| | | | | FRE\ADIEPNGKVKYDEFIHKI/TLLPGRDLLKEENGRASPGP |
| | | | | ENLEQLIFL |
| 531 | 1270 | 25 | 1396 | ADPHTTVIRFFPAASATKRVLPPVLRVSSPRTWNPNVPESPRI |
| | | | | PAPRLPKRMSGAPTAGAALMKCAATAVLLSAQGGPVQSKSPRF |
| | | | | ASWDEMNVLAHGLLQLGQGLPEHAERTRSQLSALERRISACGS |
| | | | | ACQGTEGSTDLPLAPESRVDPEVLHSLQTQLKAQNSRIQQLFH |
| | | | | KVAQQQRHLEKQHLRIQHLQSQFGLLDHKHLDHEVAKPARRKR |
| | | | | LPEMAQPVDPAHNVSRKHRLPRDCQELFQVGERQSGLFEIQPQ |
| | | | | GSPPFLVNCKMTSDGGWTVIQRRHDGSVDFNRPWEAYKAGFGD |
| | | | | PHGEFWLGLEKVHSITGDRNSRLAVQLRDWDGNAELLQFSVHL |
| | | | | GGEDTAYSLQLTAPVAGQLGATTVPPSGLSVPFSTWDQDHDLR |
| | | | | RDKNCAKSLSGGWWFGTCSHSNLNGQYFRSIPQQRQKLKKGIF |
| | | | | WKTWRGRYYPLQATTMLIQPMAAEAAS |
| 532 | 1271 | 1276 | 90 | ALDFGDSCQWPRPQDTMKQLPVLEPGDKPRKATWYTLTVPGDS |
| | | | | PCARVGHSCSYLPPVGNAKRGKVFIVGGANPNRSFSDVHTMDL |
| | | | | GKHQWDLDTCKGLLPRYEHASFIPSCTPDRIWVFGGANQSGNR |
| | | | | NCLQVLNPETRTWTTPEVTSPPPSPRTFHTSSAAIGNQLYVFG |
| | | | | GGERGAQPVQDTKLHVFDANTLTWSQPETLGNPPSPRHGHVMV |
| | | | | AAGTKLFIHGGLAGDRFYDDLHCIDISDMKWQKLNPTGAA\PA |
| | | | | GCAS/HTPAVAMGK\HVYI\FGGMTPAGAPGTQCTQYHTEEQH |
| | | | | WDPCLKF\DTPSYPPGTIGTHSHVVSFPW\PVTCASEKEDS\N |
| | | | | SLTLNHEAEKEDSADKVMSHSGDSHEESQTATLLCLVFGGMNT |
| | | | | EGEIYDDCIVTVVD |
| 533 | 1272 | 1169 | 639 | GFSIGKATDRNDAFRKAKNFAVHHLHYIERYEDHTIFHDISLR |
| | | | | FKRTHIKMKKQPKGYGLRCHRAIITICRLIGIKDMYAKVSGSI |
| | | | | NMLSLTQGLFRGLSRQETHQQLADKKGLHVVEIREECGPLPIV |
| | | | | VASPRGPLRKDPEPEDEVPDVKLDWEDVKTAQGMKRSVWSNLK |
| | | | | RAAT |
| 534 | 1273 | 25 | 1396 | ADPHTTVIRFFPAASATKRVLPPVLRVSSPRTWNPNVPESPRI |
| | | | | PAPRLPKRMSGAPTAGAALMLCAATAVLLSAQGGPVQSKSPRF |
| | | | | ASWDEMNVLAHGLLQLGQGLREHAERTRSQLSALERRLSACGS |
| | | | | ACQGTEGSTDLPLAPESRVDPEVLHSLQTQLKAQNSRIQQLFH |
| | | | | KVAQQQRHLEKQHLRIQHLQSQFGLLDHKHKDHEVAKPARRKR |
| | | | | LPEMAQPVDPAHNVSRKHRLPRDCQELFQVGERQSGLFEIQPQ |
| | | | | GSPPFLVNCKMTSDGGWTVIQRRHDGSVDFNRPWEAYKAGFGD |
| | | | | PHGEFWLGLEKVHSITGDRNSRKAVQLRDWDGNAELLQFSVHL |
| | | | | GGEDTAYSLQLTAPVAGQLGATTVPPSGLSVPFSTWDQDHDLR |
| | | | | RDKNCAKSLSGGWWFGTCSHSNLNGQYFRSIPQQRQKLKKGIF |
| | | | | WKTWRGRYYPLQATTMLIQPMAAEAAS |
| 535 | 1274 | 23 | 1102 | TLRSRPAGEAGYLGWDPEQAGEGSALSRPGAMAAKMTPGTGAP |
| | | | | PAPGDFSGEGSQGLPDPSPEPKQLPELIPMKRDGGRLSEADIR |
| | | | | GFVAAVVNGSAQGAQIGAWGGLGVPDPDWEVSPRDFGSLGVRR |
| | | | | CPTTSTGPRVPHRCGLPPSRVPPHTRG\MLMAIRLRGMDLEET |
| | | | | SVLTQALAQSGQQLEWPEAWRQQLVDKHSTGGVGDKVSLVLAP |
| | | | | ALAACGCKVINHLLSRREPIPHMQQPVHPQAAPNLKPGPKPPR |
| | | | | PYQGFSPPCSPAQFSPPRSPAQRLGPLWKQTRPLGAGKRSTDG |
| | | | | IQTPFPLGPQTAPPREELRTSLPLPQALFPQGQVPTSSPTDTS |
| | | | | QPRKLPFHSLTSWAPL |
| 536 | 1275 | 3 | 439 | RALRELRERVTHGLAEAGRDREDVSTELYRALEAVRLQNSEGS |
| | | | | CEPCPTSWLPFGGSCYYFSVPKTTWAEAQGHCADASAHLA\IV |
| | | | | GGLGEQDFLSRDTSALEYWIGRRAVQHLRKVQGYSWVDGVPLS |
| | | | | FR*/WEG/HPGETWGPQVRL |
| 537 | 1276 | 1 | 564 | RWPRSWPPRAGAARGAAEAAMVGALCGCWFRLGGARPLIPLGP |
| | | | | TVVQTSMSRSQVALLGLSLLLMLLLYVGLPGPPEQTSCLWGDP |
| | | | | NVTVLAGLTPGNSPIFYREVLPLNQAHRVEV\CCFMERPLTLT |
| | | | | RGSSWAHCSYCHRGATGPWPLTFQVLGTRHLQRRQAQRQGGQR |
| | | | | CWSGRCGTWRYRMPCW |
| 538 | 1277 | 102 | 1549 | QENQLEKKMKFLIFAFFGGVHLLSLCSGKAICKNGISKRTFEE |
| | | | | IKEEIASCGDVAKAIINLAVYGKAQNRSYERLALLVDTVGPRL |
| | | | | SGSKNLEKAIQIMYQNLQQDGLEKVHLEPVRIPRWERGEESAV |
| | | | | MLEPRIHKIAILGLGSSIGTPPEGITAEVLVVTSFDELQRRAS |
| | | | | EARGKIVVYNQPYINYSRTVQYRTQGAVEAAKVGALASLIRSV |
| | | | | ASFSIYSPHTGIQEYQDGVPKIPTACITVEDAENMSRMASHGI |
| | | | | KIVIQLKMGAKTYPDTDSFNTVAEITGSKYPEQVVLVSGHLDS |
| | | | | WDVGQGAMDDGGGAFISWEALSLIKDLGLRPKRTLRLVLWTAE |
| | | | | EQGGVGAFQYYQLHKVNISNYSLVMESDAGTFLPTGLQFTGSE |
| | | | | KARAIMEEVMSLLQPLNITQVLSHGEGTDINFWIQAGVPGASL |
| | | | | LDDLYKYFFFHHSHGDTMTVHGIQTQMNV\AAAV\WAVVSYV\ |
| | | | | VADMEEMLPRS |
| 539 | 1278 | 2438 | 1148 | TKPRKRRHQPASQRQRPWSSDSTGDLLARGKGRKEENKGSDRV |
| | | | | SLAPPSLRRPMMCQSEARQGPELRAAKWLHFPQLALRRRLGQL |
| | | | | SCMSRPALKLRSWPLTVLYYLLPFGALRPLSRVGWRPVSRVAL |
| | | | | YKSVPTRLLSRAWGRLNQVELPHWLRRPVYSLYIWTFGVNMKE |
| | | | | AAVEDLHHYRNLSEFFRRKLKPQARPVCGLHSVISPSDGRILN |
| | | | | FGQVKNCEVEQVKGVTYSLESFLGPRMCTEDLPFPPRRSCDSF |
| | | | | KNQLVTREGNELYHCVIYLAPGDYHCFHSPTDWTVSHRRHFPG |
| | | | | SLMSVNPGMARWIKELFCHNERVVLTGDWKHGFFSLTAVGAT\ |
| | | | | NWGSIRIYFDRDLHTNSPRHSKGSYRDFSFVTHTNREGVPMRK |
| | | | | GEHLGEFNLGSTIVLIFEAPKDFNFQLKRGQKI\RFGEALGSL |
| 540 | 1279 | 3 | 1911 | LPERAFGPRTPRAPRPRRPRLLLSPPPRPPPPLDRRPRAPGPW |
| | | | | LCPSRAGTAQDPARIRERRGRVAGGAAGPAMELRARGWWLLCA |
| | | | | AAALVACARGDPASKSRSCGEVRQIYGAKGFSSS\DVPQAEIS |
| | | | | GEHLRICPQGYTCCTSEMEENLANRSHAELETALRDSSRVLQA |
| | | | | MLATQLRSFDDHFQHLLNDSERTLQATFPGAFGELYTQNARAF |
| | | | | RDLYSELRLYYRGANLHLEETLAEFWARLLERLFKQLHPQLLL |
| | | | | PDDYLDCLGKQAEALRPF\GEAP\RELRLRAT\RA\FVAAR\S |
| | | | | FVQGLGVAS\DVVRKVAQVPLG\PEC\SRAVIEAGSYC/ALHC |
| | | | | VGVPGARPCPDYCRNVLKGCLANQADLDAEWRNLLDSMVLITD |
| | | | | KFWGTSGVESVIGSVHTWLAEAINALQDNRDTLTAKVIQGCGN |
| | | | | PKVNPQGPGPEEKRRRGKLAPRERPPSGTLEKLVSEAKAQLRD |
| | | | | VQDFWISLPGTLCSEKMALSTASDDRCWNGMARGRYLPERRGD |
| | | | | GLRNQINNPEVEVDITKPDMTIRQQIMQLKIMTNPRKRSARGN |
| | | | | DVDFQDASDDGSGSGSGDGCLDDLCGRKVSRKSSSSRTPLTHA |
| | | | | LPGLSEQEGQKTSAASCPQPPTFLLPLLLFLLRPRWR |
| 541 | 1280 | 590 | 189 | ATELTRAGMEASALTKSA\VTSVAKVVR\VASGSAVVLPLARI |
| | | | | ATSCD*RVGGP/VQAVPMVL\SAMGLQLRAGIASSSIAAKMMS |
| | | | | AAAIA\NGGGVSPGQPLWLLLQSLGATGL\SGLTKFILGSIGS |
| | | | | AIA\AVIARFY |
| 542 | 1281 | 41 | 1415 | TNGRNLLHHWILGVCGMHPHHQETLKKNRVVLAKQLLLSELLE |
| | | | | HLLEKDIITLEMRELIQAKVGSFSQNVELLNLLPKRGPQAFDA |
| | | | | FCEALRETKQGHLEDMLLTTLSGLQHVLPPLSCDYDLSLPFPV |
| | | | | CESCPLYKKLRLSRDTVEHSLDNKDGPVCLQVKPCTPEFYQTH |
| | | | | FQLAYRLQSRPRGLALVLSNVHFTGEKELEFRSGGDVDHSTLV |
| | | | | TLFKLLGYDVHVLCDQTAQEMQEKLQNFAQLPAHRVTDSCIVA |
| | | | | LLSHGVEGAIYGVDGKLLQLQEVFQLFDNRNCPSLQNKPKMFF |
| | | | | IQACRGGAIGSLGHLLLFTAATASLAL\ETDRGVDQQDGKNHA |
| | | | | GSPGCEESDAGKEKLPKMRLPTRSDMICGYACLKGTAAMRNTK |
| | | | | RGSWYIEALAQVFSERACDMHVADMLVKVNALIKDREGYAPGT |
| | | | | EFHRCKEMSEYCSTLCRHLYLFPGHPPT |
| 543 | 1282 | 862 | 275 | VRGKEVMAALCRTRAVAAESHFLRVFLFFRPFRGVGTESGSES |
| | | | | GSSNAKEPKTRAGGFASALERHSELLQKVEPLQKGSPKNVESF |
| | | | | ASMLRLSPLTQMGPAXDKKVIGRIFHIVENDL\YIDFGGKFHC |
| | | | | VCRRPEVDGEKY\QKGTRVR\LRLLDLELTSRFLGATTD\TTV |
| | | | | LEANAVLLGIQESKDSRSKEEHLEKYI |
| 544 | 1283 | 2 | 4503 | IPGASPAPRRAAPLRLGLRLASGWARAPGGVSPVPGPGMGGDA |
| | | | | PTMARAQAKVLELTFQLCAPETETPEVGCTFEEGSDPAVPCEY |
| | | | | SQAQYDDFQWEQVRIHPGTRAPADLPHGSYLMVNTSQHAPGQR |
| | | | | AHVIFQSLSENDTECVQFSYFLYSRNGHSPGTLGVYVRVNGGP |
| | | | | LGSAVWNMTGSHGRQWHQAELAVSTFWPNEYQVLFEALISPDR |
| | | | | RGYMGLDDILLLSYPCAXAPHFSRLGDVEVNAGQNASFQCMAA |
| | | | | GRAAEAERFLLQRQSGALVPAAGVRHISHRRFLATFPLAAVSR |
| | | | | AEQDLYRCVSQAPRGRGTSLNFAEFMV/KEPPTPIAPPQLLRA |
| | | | | GPTYLIIQLNTNSIIGDGPIVRKEIEYRMARGPWAEVHAVSLQ |
| | | | | TYKLWHLDPDTEYEISVLLTRPGDGGTGRPGPPLISRTKCAEP |
| | | | | MRAPKGLAFAEIQARQLTLQWEPLGYNVTRCHTYTVSLCYHYT |
| | | | | LGSSHNQTI\RECVKTEQGVSRYTMKNLLPYPRVHVRLVLTNP |
| | | | | EGRKEGKEVTFQTDEDVPSGIAAESLTFTPLEDMIFLKWEEPQ |
| | | | | EPNGLITQYEISYQSIESSDPAVNVPGPRRTISKLRNETYHVF |
| | | | | SNLHPGTTYLFSVRAPTGKGFGQAALTEITTNISAPSFDYADM |
| | | | | PSPLGESENTITVLLRPAQGRGAPISVYQVIVEEEQGSRRLRR |
| | | | | EPGGQDCFPVPLTFEAALARGLVDYFGAELAASSLPEAMPFTV |
| | | | | GDNKTYRGFWNPPLEPPLKAYLIYFQAASHKKGETRLNCLIAR |
| | | | | KAACKESKRPLEVSQRSEEMGLILGICAGGLAVLILLKGAIIV |
| | | | | IIRKGRDHYAYSYYPKPVNMTKATVNYRQEKTHMMSAVDRSFT |
| | | | | DQSTLQEDERLGLSFMDTHGYSTRGDQRSGGVTEASSLLGGSP |
| | | | | RRPCGRKGSPYHTGQLHPAVRVADLLQHINQMKTAEGYGFKQE |
| | | | | YESFFEGWDATKKKDKVKGSRQEPMPAYDRHRVKLHPMLGDPN |
| | | | | ADYINANYIDIRINREGYHRSNHFIATQGPKPEMVYDFWRMVW |
| | | | | QEHCSSIVMITKLVEVGRVKCSRYWPEDSDTYGDIKIMLVKTE |
| | | | | TLAEYVVRTFALERRGYSARHEVRQFHFTAWPEHGVPYHATGL |
| | | | | LAFIRRVKASTPPDAGPIVIHCSAGTGRTGCYIVLDVMLDMAE |
| | | | | CEGVVDIYNCVKTLCSRRVNMIQTEEQYIFIHDAILEACLCGE |
| | | | | TTIPVSEFKATYKEMIRIDPQSNSSQLREEFQTLNSVTPPLDV |
| | | | | EECSIALLPRNPKKNRSMDVLPPDRCLPFLISTDGDSNNYINA |
| | | | | ALTDSYTRSAAFIVTLHPLQSTTPDFWGLVYDYGCTSIVMLNQ |
| | | | | LNQSNSAWPCLQYWPEPGRQQYGLMEVEFMSGTADEDLVARVF |
| | | | | RVQNISRLQEGHLLVRHFQFLRWSAYRDTPDSKKAFLHLLAEG |
| | | | | DKWQAESGDGRTIVHCLNGGGRSGTFCA\CATVLEMIRCHNLV |
| | | | | DVFFAAKTLRNYKPNNVETMDQYHFCYDVALEYLEGLESR |
| 545 | 1284 | 2443 | 1152 | TKPRKRRHQPASQRQRPWSSDSTGDLLARGKGRKEENKGSDRV |
| | | | | SLAPPSLRRPMMCQSEARQGPELRAAKWLHFPQLAIRRRLGQL |
| | | | | SCMSRPALKLRSWPLTVLYYLLPFGALRPLSRVGWRPVSRVAL |
| | | | | YKSVPTRLLSRAWGRIMQVELPHWLRRPVYSLYIWTFGVNMKE |
| | | | | AAVEDLHHYRNLSEFFRRKLKPQARPVCGLHSVISPSDGRILN |
| | | | | FGQVKNCEVEQVKGVTYSLESFLGPRMCTEDLPFPPAASCDSF |
| | | | | KRQLVTREGNELYHCVIYLAPGDYHCFHSPTDWTVSHRRHFPG |
| | | | | SLMSVNPGMARWIKELFCHNERVVLTGDWKHGFFSLTAVGAT\ |
| | | | | NWGSIRIYFDRDLHTNSPRHSKGSYNDFSFVTHTNREGVPMAL |
| | | | | RGEHLG/QSFNLGSTIVLIFEAPKDFNFQLKTGQKIRFGEALG |
| | | | | SL |
| 546 | 1285 | 185 | 3057 | AELGLFGSLRFSSLLHFPPRPRSPASACGPGEGRMERGLPLLC |
| | | | | AVLALVLAPAGAFRNDKCGDTIKIESPGYLTSPGYPHSYHPSE |
| | | | | KCEWLIQAPDPYQRIMINFNPHFDLEDRNCKYDYVEVFDGENE |
| | | | | NGHFRGKFCGKIAPPPVVSSGPFLFIKFVSDYETHGAGFSIRY |
| | | | | EIFKRGPECSQNYTTPSGVIKSPGFPEKYPNSLECTYI\VFAP |
| | | | | KMSEIIL\DFESFDLEPDSNPPGGMFCRYDRLEIWDGFPDVGP |
| | | | | HIGRYCGQKTPGRIRSSSGILSMVFYTDSAIAKEGFSANYSVL |
| | | | | QSSVSEDFKCMEALGMESGEIHSDQITASSQYSTNWSAERSRL |
| | | | | NYPENGWTPGEDSYREWIQVDLGLLRFVTAVGTQGAISKETKK |
| | | | | KYYVKTYKIDVSSNGEDWITIKEGNKPVLFQGNTNPTDVVVAV |
| | | | | FPKPLITRFVRIKPATWETGISMRFEVYGCKITDYPCSGMLGM |
| | | | | VSGLISDSQITSSNQGDRNWMPENIRLVTSRSGWALPPAPHSY |
| | | | | INEWLQIDLGEEKIVRGIIIQGGKHRENKVFMRXFKIGYSNNG |
| | | | | SDWKMIMDDSKRKAKSFEGNNNYDTPELRTFPALSTRFIRIYP |
| | | | | ERATHGGLGLRMELLGCEVEAPTAGPTTPNGNLVDECDDDQAN |
| | | | | CHSGTGDDFQLTGGTTVLATEKPTVIDSTIQSEFPTYGFNCEF |
| | | | | GWGSHKTFCHWEHDNHVQLKWSVLTSKTGPIQDHTGDGNFIYS |
| | | | | QADENQKGKVARLVSPVVYSQNSAHCMTFWYHMSGSHVGTLRV |
| | | | | KLRYQKPEEYDQLVWMAIGHQGDHWKEGRVLLHKSLKLYQVIF |
| | | | | EGEIGKGNLGGIAVDDISINNHISQEDCAKPANLDKKNPEIKI |
| | | | | DETGSTPGYEGEGEGDKNISRKPGNVLKTLEPILITIIAMSAL |
| | | | | GVLLGAVCGVVLYCACWHNGMSERNLSALENYNFELVDGVKLK |
| | | | | KDKLNTQSTYSEA |
| 547 | 1286 | 3 | 521 | HEGSAKTWASHYQERLNSEQSCLNEWTAMADLESLRPPSAEPG |
| | | | | GSVCGGEGLGGGEGRIMQWGAWWRGERAP*LRGSAPRSSEQEQ |
| | | | | MEQAIRAELWKVLDVSDLESVTSKEIRQAKELRLGLPLQ/PVP |
| | | | | *LHRQPDAAAGGTAGPSLPHLPPPLPGLRVERSKPGGAAEEQV |
| | | | | GL |
| 548 | 1287 | 1742 | 1200 | MAALDLRAELDSLVLQLLGDLEELEGKRTVLNARVEEGWLSLA |
| | | | | KARYAMGAKSVGPLQYASHMEPQVCLHASEAQEGLQKFKVVRA |
| | | | | GVHAPEEVGPREAGLRRRKGPTKTPEPESSEAPQDPLNWFGIL |
| | | | | VPHSLRQAQASFRDGLQLAADIASLQNRIDWGRSQLRGLQEKL |
| | | | | KQLEPGAA* |
| 549 | 1288 | 1 | 649 | HSDVGAATAVLPLLTAVLGVTVVTRRDTEGPGRAALVHLTGSP |
| | | | | RQKVGTSGREGLPGLGASCAESELERETQEPRSRGRCIFGAAR |
| | | | | WRQVPLASPQRPFLLSPGPRLHRMGLPVSWAPPALWVLGCCAL |
| | | | | LLSLWALCTACRRPEDAVAPRKRARRQRAPLQGSATAAEAVSA |
| | | | | KLSRGPGWGPQGTDQPSSPPVPTEADPPLLPQQVGHQTAPAAP |
| | | | | G |
| 550 | 1289 | 433 | 632 | LTGPGQRLAGTTEGPRRCRGSSQAPTPTWKLVDTRLCAAAPWL |
| | | | | ASRAPGHYSQMLLVN*PCRKDWLVSKWMRTPVCGQSPAMTDRP |
| | | | | RSEAGRDHRRAKALPGLIPGSNPNLEACGHQALCSSSVASVQG |
| | | | | PWPLLPNASSPPTPGQPQP |
| 551 | 1290 | 102 | 612 | KHRLCSLEQLMTLISAAREYEIEFIYAISPGLDITFSNPKEVS |
| | | | | TLKRKLDQVSQFGCRSFALLFDDIDHNMCAADKEVFSSFAHAQ |
| | | | | VSITNEIYQYLGEPETFLFCPT/EYCI*WLYI*LVFLEYITYK |
| | | | | GPWAPFSLHFPPPLVCKSRNLFLEDIFQDPKLEKF*ELINDN |
| 552 | 1291 | 269 | 565 | TSAKTQGLERIPDQLGYLVLSEGAVLASSGDLENDEQAASAIS |
| | | | | ELVSTACGFRLHRGMNVPFKRLSVVFGEHTLLVTVSGQRVFVV |
| | | | | KRQNRGREPIDV |
| 553 | 1292 | 660 | 233 | AKRAERTSRLQGLQHPSPPYPPATLGVTPGQDRTLQLQHQCPA |
| | | | | GRKSRKKKSKATQLSPEDRVEDALPPSKAPSRTRRAKRDLPKR |
| | | | | TATQRPEGTSLQQDPEAPTVPKKGRRKGRQAASGHCRPRKVKA |
| | | | | DIPSLEPEGTSAS |
| 554 | 1293 | 590 | 323 | RKSSWLGAVAHACRPSSLGGPGRQITRSGVRDQPGQYGETPSL |
| | | | | LKIQTLAGRGGACL*SHILRRKRQKNRKNLGGRGCSELRSRHC |
| | | | | APA |
| 555 | 1294 | 1 | 242 | AWNSARGAVSPLWVPGCFLTLSVTWIGAAPLILSRIVGGWECE |
| | | | | KHSQPWQVLVASRGRAVCGGVLVHPQWVLTAAHCIRK |
| 556 | 1295 | 1074 | 230 | AEMADDLGDEWWENQPTGAGSSPEASDGEGEGDTEVMQQETVP |
| | | | | VPVPSEKTKQPKECFLIQPKERKENTTKTRKRRKKKITDVLAK |
| | | | | SEPKPGLPEDLQKLMKDYYSSRRLVIELEELNLPDSCFLKAND |
| | | | | LTHSLSSYLKEICPKWVKLRKNHSEKKSVLMLIICSSAVRALE |
| | | | | LIRSMTAFRGDGKVIKLFAKHIKVQAQVXLLEKRVVHLGVGTP |
| | | | | GRIKELVKQGGLNLSPLKFLVFDWNWRDQKLRRMMDIPEIRKE |
| | | | | VFELLEMGVLSLCKSESLKLGLF |
| 557 | 1296 | 929 | 289 | RPGTAIWVVECEHGRPIAESEGQEGRGHSPPGPCSVAGFLRGR |
| | | | | LGRNLEIMGSTWGSPGWVRLALCLTGLVLSLYAKHVKAARARD |
| | | | | RDYRALCDVGTAISCSRVFSSRWGRGFGLVEHVLGQDSILNQS |
| | | | | NSIFGCIFYTLQLLLGCLRTRWASVLMLLSSLVSLAGSVYLAW |
| | | | | ILFFVLYDFCIVCITTYAINVSLMWLSFRKVQEPQGKAKRH |
| 558 | 1297 | 2 | 1063 | ESPAPPAFRPAMAAVALMPPPLLLLLLLASPPAASAPSARDPF |
| | | | | APQLGDTQNCQLRCRDRDLGPQPSQAGLEGASESPYDRAVLIS |
| | | | | ACERGCRLFSICRFVARSSKPNATQTECEAACVEAYVKEAEQQ |
| | | | | ACSHGCWSQPAEPEPEQKRKVLEAPSGALSLLDLFSTLCNDLV |
| | | | | NSAQGFVSSTWTYYLQTDNGKVVVFQTQPIVESLGFQGGRLQR |
| | | | | VEVTWRGSHPEALEVHVDPVGPLDKVRKAKIRVKTSSKAKVES |
| | | | | EEPQDNDFLSCMSRRSGLPRWILACCLFLSVLVMLWLSCSTLV |
| | | | | TAPGQHLKFQPLTLEQHKGFMMEPDWPLYPPPSHACEDSLPPY |
| | | | | KLKLDLTKK |
| 559 | 1298 | 2 | 485 | FPELGTSLSAMRFLAATFLLLALSTAAQAEPVQFKDCGSVDGV |
| | | | | IKEVNVSPCPTQPCQLSKGQSYSVNVTFTSNIQSKSSKAVVHG |
| | | | | ILMGVPVPFPIPEPDGCKSGINCPIQKDKTYSYLNKLPVKSEY |
| | | | | PSIKLVVEWQLQDDKNQSLFCWEIPVQIVSEL |
| 560 | 1299 | 1304 | 919 | APETFRCVWRLQGLTFIAFTELQAKVIDTQQKVKLADIQIEQL |
| | | | | NRTKKHAHLTDTEIMTLVDETNMYEGVGRMFILQSKEAIHSQL |
| | | | | LEKQKIAEEKIKELEQKKSYLERSVKEAEDNIREMLMARRAQ |
| 561 | 1300 | 3 | 799 | HSLLLGTRVRDASSKIQGEYTLTLRKGGNRKLSRVFHRDGHYG |
| | | | | FSEPLTFCSVVDLINHYRHESLAQYNAKKDTRLLYPVSKYQQV |
| | | | | RAGLGAREGSTWLAPGLSFLGRPDQAMHLPSFRHVSP\DQIVK |
| | | | | EDSVEAVGAQLKVYHQQYQDKSREYDQLYEEYTRTSQELQMKR |
| | | | | TAIEAFNETIKIFEEQGQTQEKCSKEYLERFRREGN/QTKEMQ |
| | | | | RILLNSERLKSRIA\EIHESPHRSWEQQLLVPRASDNKRD/ID |
| | | | | KPH*TSLKPDL |
| 562 | 1301 | 1772 | 301 | AAAAAGRGRSSGRRRRRRPGALFASLGVLLGPRPPPGIPRTRA |
| | | | | CSMGGVGEPGPREGPAQPGAPLPTFCWEQIRAHDQPGDKWLVI |
| | | | | ERRVYDISRWAQRHPGGSRLIGHHGAEDATDAFRAFHQDLNFV |
| | | | | RKFLQPLLIGELAPEEPSQDGPLNAQLVEDFRALHQAAEDMKL |
| | | | | FDASPTFFAFLLGHILAMEVLAWLLIYLLGPGWVPSALAAFIL |
| | | | | AISQAQSWCLQHDLGHASIFKKSWWNHVAQKFVMGQKKGFSAH |
| | | | | WWNFRHFQHRAKPNIFHKDPDVTVAPVFLLGESSVEYGKKKRR |
| | | | | YLPYHQQHLYFFLIGPPLLTLVNFEVENLAYMLVCMQWADLLW |
| | | | | AASFYARFFLSYLPFYGVPGVLLFFVAVRVLESHWFVWITQNN |
| | | | | HIPKEIGHEKHRDNVSSQLAATCNVEPSLFTNWFSGHLNFQIE |
| | | | | HHLFPRMPRHNYSRVAPLVKSLCALIGLSYEVKPFLTALVDIV |
| | | | | RSLKKSGDIWLDAYLHQ |
| 563 | 1302 | 424 | 93 | KSRATRLRESAEMTGFLLPPASRGTRRSCSRSRKRQTRRRRNP |
| | | | | SSFVASCPTLLPFACVPGASPTTLAFPPVVLTGPSTDGIPFAL |
| 564 | 1303 | 1 | 414 | IQYRSDLELHSITMKKSGVLFLLGIILLVLIGVQGTPVVRKGR |
| | | | | CSCISTNQGTIHLQSLKDLKQFAPSPSCEKIEIIATLKNGVQT |
| | | | | CLNPDSADVKELIKKWEKQVSQKKKQKNGKKHQKKKVLKVRKS |
| | | | | QRSRQKKTT |
| 565 | 1304 | 7 | 3007 | IPGSTISCRGCCGKWPVQEADPPRAALRGRFPALLTRKCPSPR |
| | | | | ABKEKRSLRRCGCRPLLVELAGPAGQAVEVLPHFESLGKQEKI |
| | | | | PNKMSAFRNHCPHLDSVGEITKEDLIQKSIGTCQDCKVQGPNL |
| | | | | WACLENRCSYVGCGESQVDHSTIHSQETKHYLTVNLTTLRVWC |
| | | | | YACSKEVFLDRKLGTQPSLPHVRQPHQIQENSVQDFKIPSNTT |
| | | | | LKTPLVAVFDDLDIEADEEDELRARGLTGLKNIGNTCYMNAAL |
| | | | | QALSNCPPLTQFFLDCGGLARTDKKPAICKSYLKLMTELWYKS |
| | | | | RPGSVVPTTLFQGIKTVNPTFRGYSQQDAQEFLRCLMDLLHEE |
| | | | | LKEQVMEVEEDPQTITTEETMEEDKSQSDVDFQSCESCSNSDR |
| | | | | AENENGSRCFSEDNNETTMLIQDDELNSEMSKDWQKEKMCNKI |
| | | | | NKVNSEGEFDKDRDSISETVDLNNQETVKVQIHSRASEYITDV |
| | | | | HSNDLSTPQILPSNEGVNPRLSASPPKSGNLWPGLAPPHKKAQ |
| | | | | SASPKRKKQHKKYRSVISDIFDGTIISSVQCLTCDRVSVTLET |
| | | | | FQDLSLPIPGKEDLAKLHSSSEPTSIVKAGSCGEAYAPQGWIA |
| | | | | FFMEYVKRFVVSCVPSWFWGPVVTLQDCLAAFFARDELKGDNM |
| | | | | YSCEKCKKLPNGVKFCKVQNFPEILCIHLKRFRHELMFSTKIS |
| | | | | THVSFPLEGLDLQPFLAKDSPAQIVTYDLLSVKHIIGTASSGH |
| | | | | YIAYCRNNLNNLWYEFDDQSVTEVSESTVQNAEAYVLFYRKSS |
| | | | | EEAQKERRRISNLLNIMEPSLLQFYISRQWKNKFKTFAEPGPI |
| | | | | SNNDFLCIHGGVPPRKAGYIEDLVLMLPQNIWDNLYSRYGGGP |
| | | | | AVNHLYICHTCQIEAEKIEKRRKTELEIFIRLNRAFQKEDSPA |
| | | | | TFYCISMQWFREWESFVKQKDGDPPGPIDNTKIAVTKCGNVML |
| | | | | RQGADSGQISEETWNFLQSIYGGGPEVILRPPVVHVDPDILQA |
| | | | | EEKIEVETRSL |
| 566 | 1305 | 28 | 450 | SPSAAGGLAWVSLALGSGSRGRDHSGSGVGTAMAGALVRKAAD |
| | | | | YVRSKDFRDYLMSTHFWGPVANWGLPIAAINDMKKSPEIISGR |
| | | | | MTFALCCYSLTFMRFAYKVQPRNWLLFACHATNEVAQLIQGGR |
| | | | | LIKHEMTKTASA |
| 567 | 1306 | 133 | 1292 | LGSRQAAGTMRGQRSLLLGPARLCLRLLLLLGYRLRCPPLLRG |
| | | | | LVQRWRYGKVCKRSLLYNSFGGSDTAVDAAFEPVYWLVDNVIR |
| | | | | WFGVVFVVKVIVLTGSIVAIAYLCVLPLILRTYSVPRLCWHFF |
| | | | | YSHWNLILIVFHYYQAITTPPGYPPQGRNDIATVSICKKCIYP |
| | | | | KPARTHHCSICNRCVLKMDHHCPWLNNCVGHYNHRYFFSFCFF |
| | | | | MTLGCVYCSYGSWDLFREAYAAIEKMKQLDKNKLQAVANQTYH |
| | | | | QTPPPTFSFRERMTHKSLVYLWFLCSSVALALGALTVRHAVLI |
| | | | | SRGETSIERHINKKERRRLQAKGRVFRNPYNYGCLDNWKVFLG |
| | | | | VDTGRHWLTRVLLPSSHLPHGNGMSWEPPPWVTAHSASVMAV |
| 568 | 1307 | 66 | 962 | ATRREAAEAGMAAVLQRVERLSNRVVRVLGRNPGPMTLQGTNT |
| | | | | YLVGTGPRRILIDTGEPAIPEYISCLKQALTEFNTAIQEIVVT |
| | | | | HWHRDHSGGIGDICKSINNDTTYCIKKLPRNPQREEIIGNGEQ |
| | | | | QYVYLKDGDVIKTEGATLRVLYTPGHTDDHMALLLEEENAIFS |
| | | | | GDCIKGEGTTVFEDLYDYMNSLKELLKIKADIIYPGHGPVIHN |
| | | | | AEAKIQQYISHRNIREQQILTLFRENFEKSFTVMELVKIIYKN |
| | | | | TPENLHEMAILLLLKLEKEGKIFSNTDPDKWKAHL |
| 569 | 1308 | 96 | 1017 | ELHPAGOVAGGARRSRRESMELERIVSAALLAFVQTHLPEADL |
| | | | | SGLDEVIFSYVLGVLEDLGPSGPSEENFDMEAFTEMMEAYVPG |
| | | | | FAHIPRGTIGDMMQKLSGQLSDARNKENLQRQSSGVQGQVPIS |
| | | | | PEPLQRPEMLKEETRSSAAAAADTQDEATGAEEELLPGVDVLL |
| | | | | EVFPTCSVEQAQWVLAKARGDLEEAVQMLVEGKEEGPAAWEGP |
| | | | | NQDLPRRLRGPQKDELKSFILQKYMMVDSREDQKIHRPMAPKE |
| | | | | APKKLIRYIDNQVVSTKGERFKDVRNPEAEEMKATYINLKPAR |
| | | | | KYRFH |
| 570 | 1309 | 3 | 526 | FITGKGIVAILRCLQFNETLTELRFHNQRBMLGHHAEMEIARL |
| | | | | LKANNTLLKMGYHFELPGPRMVVTNLLTRNQDKQRQKRQEEQK |
| | | | | QQQLKEQKKLIANLENGLGLPPGMWELLGGPKPDSRMQEFFQP |
| | | | | PPPRPPNPQNVPFSQRSEMMKKPSQAPKYRTDPDSFRVVKLKR |
| | | | | IQ |
| 571 | 1310 | 3 | 1858 | GGRAGTQCCWRAGARLRGISPSPALPEAPGLCRVRAGLGAGAL |
| | | | | GRSPAGRRRRGPRVSSSPAPHPRRVLCRCLLFLFFSCHDRRGD |
| | | | | SQPYQALKYSSKSHPSSGDHRHEKMRDAGDPSPPNKMLRRSDS |
| | | | | PENKYSDSTGHSKAKNVHTHRVRERDGGTSYSPQENSHNHSAK |
| | | | | HSSNFTFFLIPSN*PQGKTFRIAPYDS\ADDW/SLEHISSSGE |
| | | | | KYYYNCRTEVSQWGKTPKSGLERGQRQKEANKMAVNSFPKDRN |
| | | | | YRREVMQATATSGFASGKSTSGDKPVSHSCTRPSTSSASGLNP |
| | | | | TSAPPTSASA\VPVSP\VPQ\SPIPPLLQDPNLLRQLL\PALE |
| | | | | ATLQLNNSNVDI\SIINEVLTGDVTQASKQTIIHKCLTAGPSV |
| | | | | FKITSLISQAAQLSTQAQASNQSPMSLTSDASSPR\SYVSPPL |
| | | | | KAHKKLNTVPIQTFGFSTPPVSSQPKVSTPVVKQGPVSQSATQ |
| | | | | QPVTADKQQGHEPVSPRSLQRSSSQRSPSPGPNHTSNSSNASN |
| | | | | ATVVPQNSSARSTCSLTPAIAAHFSENLIKHVQGWPADHAEKQ |
| | | | | ASRLREEAHNMGTIHMSEICTELKNLRSLVRVCEIQATLREQR |
| | | | | ILFLRQQIKELEKLKNQNSFMV |
| 572 | 1311 | 2 | 1165 | VAPECRGAYPFRARMPGTALKAVLLAVLLVGLQTATGRLLSGQ |
| | | | | PVCRGGTQRPCYKVIYFHDTSRRLNFEEAKEACRPDGGQLVSI |
| | | | | ESEDEQKLIEKFIENLLPSDGDFWIGLRRREEKQSNSTACQDL |
| | | | | YAWTDGSISQFRNWYVDEPSCGSEVCVVMYHQPSAPAGIGGPY |
| | | | | MFQWNDDRCNMKNNFICKYSDEKPAVPSREAEGEETELTTPVL |
| | | | | PEETQEEDAKKTFKESREAAKNLAYILIPSIPLLLLLVVTTVV |
| | | | | CWVWICRKRKREQPDPSTKKQHTIWPSPHQGNSPDLEVYNVIR |
| | | | | KQSEADLAETRPDLKNISFRVCSGEATPDDMSCDYDNMAVNPS |
| | | | | ESGFVTLVSVESGFVTNDIYEFSPDQMGRSKESGWVENEIYGY |
| 573 | 1312 | 3 | 1416 | TEWGLSGSCPGCSPLEPGSRGRGAAAWRILRCRRLPEPSPFLT |
| | | | | QPNLAQSQPPAPVPVTDPSVTMHPAVFLSLPDLRCSLLLLVTW |
| | | | | VFTPVTTEITSLDTENIDEILNNANVALVNFYANWCRFSQMLH |
| | | | | PIFEEASDVIKEEFPNENQVVFARVDCDQHSDIAQRYRISKYP |
| | | | | TLKLFRNGMMMKREYRGQRSVKALADYIRQQKSDPIQEIRDLA |
| | | | | EITTLDRSKPNIIGYFEQKDSDNYRVFERVANILHDDCAFLSA |
| | | | | FGDVSKPERYSGDNIIYKPPGHSAPDMVYLGAMTNFDVTYNWI |
| | | | | QDKCVPLVREITFENGEELTEEGLPFLILFHMKEDTESLEIFQ |
| | | | | NEVARQLISEKGTINFLHADCDKFRHPLLHIQKTPADCPVIAI |
| | | | | DSFRHMYVFGDFKDVLIPGKLKQFVFDLHSGKLHREFHRGPDP |
| | | | | TDTAPGEQAQDVASSPPESSFQKLAPSEYRYTLLRDRDEL |
| 574 | 1313 | 928 | 142 | LTPSVGPVFPGRPTRPLASPFPVPLHRCSAGSQPPGPVPEGLI |
| | | | | RIYSMRFCPYSHRTRLVLKAKDIRHEVVNINLRNKPEWYYTKH |
| | | | | PFGHIPVLETSQCQLIYESVIACEYLDDAYPGRKLFPYDPYER |
| | | | | ARQKMLLELFCKVPHLTKECLVALRCGRECTNLKAALRQEFSN |
| | | | | LEEILEYQNTTFFGGTCISMIDYLLWPWFERLDVYGILDCVSH |
| | | | | TPALRLWISAMKWDPTVCALLMDKSIFQGFLNLYFQNNPNAFD |
| | | | | FGLC |
| 575 | 1314 | 884 | 363 | NTATNMTQPNAGTRKYSVPAISVHTSSSSFAYDREFLRTLPGF |
| | | | | LIVAEIVLGLLVWTLIAGTEYFRVPAFGWVMFVAVFYWVLTVF |
| | | | | FLIIYITMTYTRIPQVPWTTVGLCFNGSAFVLYLSAAYVDASS |
| | | | | VSPERDSHNFNSWAASSFFAFLVTICYAGNTYFSFIAWRSRTI |
| | | | | Q |
| 576 | 1315 | 165 | 944 | GLRDPFRRKRRLKPQVKMSNYVNDMWPGSPQEKDSPSTSRSGG |
| | | | | SSRLSSRSRSRSFSRSSRSHSRVSSRFSSRSRRSKSRSRSRRR |
| | | | | HQRKYRRYSRSYSRSRSRSRSRRYRERRYGFTRRYYRSPSRYR |
| | | | | SRSRSRSRSRGRSYCGRAYAIARGQRYYGFGRTVYPEELSRWR |
| | | | | DRSRTRSRSRTPFRLSEKDRMELLEIAKTNAAKALGTTNIDLP |
| | | | | ASLRTVPSAKETSRGIGVSSNGAKPEVSILGLSEQNFQKANCQ |
| | | | | I |
| 577 | 1316 | 265 | 2300 | AEGSTMDLTKMGMIQLQNPNHPTGLLCKANQMRLAGTLCDVVT |
| | | | | MVDSQEFHAHRTVLACTSKMFEILFHRNSQHYTLDFLSPKTFQ |
| | | | | QILEYAYTATLQAKAEDLDDLLYAAEILEIEYLEEQCLKMLET |
| | | | | IQASDDNDTEATMADGGAEEKKDRKARYLKNIFISKHSSEESG |
| | | | | YASVAGQSLPGPMVDQSPSVSTSFGLSAMSPTKAAVDSLMTIG |
| | | | | QSLLQGTLQPPAGPEEPTLAGGGRHPGVAEVKTEMMQVDEVPS |
| | | | | QDSPGAAESSISGGMGDKVEERGKEGPGTPTRSSVITSARELH |
| | | | | YGREESAEQVPPPAEAGQAPTGRPEHPAPPPEKHLGIYSVLPN |
| | | | | HKADAVLSMPSSVTSGLHVQPALAVSMDFSTYGGLLPQGFIQR |
| | | | | ELFSKLGELAVGMKSESRTIGEQCSVCGVELPDNEAVEQHRKL |
| | | | | HSGMKTYGCELCGKRFLDSLRLRMHLLAHSAGAKAFVCDQCGA |
| | | | | QFSKEDALETHRQTHTGTDMAVFCLLCGKRFQAQSALQQHMEV |
| | | | | HAGVRSYICSECNRTFPSHTALKRHLRSHTGDHPYECEFCGSC |
| | | | | FRDESTLKSHKRIHTGEKPYECNGCGKKFSLKHQLETHYRVHT |
| | | | | GEKPFECKLCHQRSRDYSAMIKHLRTHNGASPYQCTICTEYCP |
| | | | | SLSSMQKHMKGHKPEEIPPDWRIEKTYLYLCYV |
| 578 | 1317 | 686 | 908 | IWEAPTLIFTLAGGRALGHPPMQKGSQGCALPHPLPGASLPAQ |
| | | | | PGPADHRGWECRIGGEASVFTRFCLPHSPT |
| 579 | 1318 | 150 | 1204 | ASGSPAPSSSSAMAAACGPGAAGYCLLLGLHLFLLTAGPALGW |
| | | | | NDPDRMLLRDVKALTLHYDRYTTSRRLDPIPQLKCVGGTAGCD |
| | | | | SYTPKVIQCQNKGWDGYDVQWECKTDLDIAYKFGKTVVSCEGY |
| | | | | ESSEDQYVLRGSCGLEYNLDYTELGLQKLKESGKQHGFASFSD |
| | | | | YYYKWSSADSCNMSGLITIVVLLGIAFVVYKLFLSDGQYSPPP |
| | | | | YSEYPPFSHRYQRFTNSAGPPPPGFKSEFTGPQNTGHGATSGF |
| | | | | GSAFTGQQGYENSGPGFWTGLGTGGILGYLFGSNRAATPFSDS |
| | | | | WYYPSYPPSYPGTWNRAYSPLHGGSGSYSVCSNSDTKTRTASG |
| | | | | YGGTRR |
| 580 | 2319 | 1208 | 276 | GRCGAMAAGLARLLLLLGLSAGGPAPAGAAKMKVVEEPNAFGV |
| | | | | NNPFLPQASRLQAKRDPSPVSGPVHLFRLSGKCFSLVESTYKY |
| | | | | EFCPFHNVTQHEQTFRWNAYSGILGIWHEWEIANNTFTGMWMR |
| | | | | DGDACRSRSRQSKVELACGKSNRLAHVSEPSTCVYALTFETPL |
| | | | | VCHPHALLVYPTLPEALQRQWDQVEQDLADELITPQGHEKLLR |
| | | | | TLFEDAGYLKTPEENEPTQLEGGPDSLGFETLENCRKAHKELS |
| | | | | KEIKRLKGLLTQHGIPYTRPTETSNLEHLGHETPRAKSPEQLR |
| | | | | GDPGLRGS |
| 581 | 1320 | 1074 | 132 | NSFWSVLFLVQEETEVARCNAQRLRQSPRSKRPDPSFRSQPID |
| | | | | SSISFAGSDIQPLFSFASVDGTQVGEAEEWAGPWAEATLLPGP |
| | | | | GNRWPPRAGLSGNWLEEDGDWPSLPEVVGFVSERELFRDALGA |
| | | | | GCRILLICEMQLTHQLDLFPECRVTLLLFKDVKNAGDLRRKAM |
| | | | | EGTIDGSLINPTVIVDPFQILVAANKAVHLYKLGKMKTRTLST |
| | | | | EIIFNLSPNNNISEALKKFGISANDTSILIVYIEEGEKQINQE |
| | | | | YLISQVEGHQVSLKNLPEIMNITEVKKIYKLSSQEESIGTLLD |
| | | | | AIICRMSTKDVL |
| 582 | 1321 | 5021 | 7694 | QRSWAGPGAGPEAGTRPPARGRRRQPGNVDPRRRAPQLRSQMQ |
| | | | | VAMARATTATGNRLWPGKLIMLGSLCHRGSPCGLSTHIEIGHR |
| | | | | ALEFLQLHNGRVNYRELLLEHQDAYQAGIVFPDCFYPSICKGG |
| | | | | ALEFLQLHNGRVNYRELLLEHQDAYQAGIVFPDCFYPSICKGG |
| | | | | KFHDVSESTHWTPFLNASVHYIRENYPLPWEKDTEKLVAFLFG |
| | | | | ITSHMAADVSWHSLGLEQGFLRTMGAIDFHGSYSEAHSAGDFG |
| | | | | GDVLSQFEFNFNYLARRWYVPVKDLLGIYEKLYGRKVITENVI |
| | | | | VDCSHIQFLEMYGEMLAVSKLYPTYSTKSPFLVEQFQEYFLGG |
| | | | | LDDMAFWSTNIYHLTIFMLENGTSDCNLPENPLFIACGGQQNH |
| | | | | TQGSKMQKNDFHRNLTTSLTESVDRNINYTERGVFFSVNSWTP |
| | | | | DSMSFIYKALERNIRTMFIGGSQLSQKHVSSPLASYFLSFPYA |
| | | | | RLGWAMTSADLNQDGHGDLVVGAPGYSRPGHIHIGRVYLIYGN |
| | | | | DLGLPPVDLDLDKEAHRILEGFQPSGRFGSALAVLDFNVDGVP |
| | | | | DLAVGAPSVGSEQLTYKGAVYVYFGSKQGGMSSSPNITISCQD |
| | | | | IYCNLGWTLLAADVNGDSEPDLVIGSPFAPGGGKQKGIVAAFY |
| | | | | SGPSLSDKEKLNVEAANWTVRGEEDFSWPGYSLHGVTVDNRTL |
| | | | | LLVGSPTWKNASRLGHLLHIRDEKKSLGRVYGYFPPNGQSWFT |
| | | | | ISGDKAMGKLGTSLSSGHVLMNGTLKQVLLVGAPTYDDVSKVA |
| | | | | FLTVTLHQGGATRMYALTSDAQPLLLSTFSGDRRFSRFGGVLH |
| | | | | LSDLDDDGLDEIIMAAPLRIADVTSGLIGGEDGRVYVINGKET |
| | | | | TLGDMTGKCKSWITPCPEEKAQYVLISPEASSRFGSSLITVRS |
| | | | | KAKNQVVIAAGRSSLGARLSGALHVYSLGSD |
| 583 | 1322 | 1 | 357 | SKRNSARGLKMAASAARGAPAKRRSINQPVAFVRRIPWTAASS |
| | | | | QLKEHFAQFGHVRRCILPFDKETGFHRGLGWVQFSSEEGLENA |
| | | | | LQQENHIIDGVKVQVHTRRPKLPQTSDDEKKDF |
| 584 | 1323 | 1205 | 433 | GSSNIHSASTHGFCHWFSSPSTLKRQKQAIRFQKIRRQMEAPG |
| | | | | APPRTLTWEAMEQIRYLHEEFPESWSVPRLAEGFDVSTDVIRR |
| | | | | VLKSKFLPTLEQKLKQDQKVLKKAGLAHSLQHLRGSGNTSKLL |
| | | | | PAGHSVSGSLLMPGHEASSKDPNBSTALKVIESDTHRTNTPRR |
| | | | | RKGRNKEIQDLEESFVPVAAPLGHPRELQKYSSDSESPRGTGS |
| | | | | GALPSGQKLEELKAEEPDNFSSKVVQRGREFFDSNGMFLYRI |
| 585 | 1324 | 134 | 954 | ETRVKTSLEKLRTQLEPTGTVGNTIMTSQPVPNETIIVLPSNV |
| | | | | INFSQAEKPEPTNQGQDSLKKHLHAEIKVIGTIQILCGMMVLS |
| | | | | LGIILASASFSPNFTQVTSTLLNSAYPFIGPFFFIISGSLSIA |
| | | | | TEKRLTKLLVHSSLVGSILSAKSALVGFIILSVKQATLNPASL |
| | | | | QCELDKNNIPTRSYVSYFYHDSLYTTDCYTAKASLAGTLSLML |
| | | | | ICTLLEFCLAVLTAVLRWKQAYSDFPGSVLFLPHSYIGNSGMS |
| | | | | SKMTHDCGYEELLTS |
| 586 | 1325 | 106 | 1537 | EMVGAMWKVIVSLVLLMPGPCDGLFRSLYRSVSMPPKGDSGQP |
| | | | | LFLTPYIEAGKIQKGRELSLVGPFPGLNMKSYAGFLTVNKTYN |
| | | | | SNLFFWFFPAQIQPEDAPVVLWLQGGPGGSSMFGLFVEHGPYV |
| | | | | VTSNMTLRDRDFPWTTTLSMLYIDNPVGTGFSFTDDTHGYAVN |
| | | | | EDDVARDLYSALIQFFQIFPEYKNNDFYVTGESYAGKYVPAIA |
| | | | | ELIHSLNPVREVKINLNGIAIGDGYSDPESIIGGYAEFLYQIG |
| | | | | LLDEKQKKYFQKQCHECIEHIRKQNWFEAFEILDKLLDGDLTS |
| | | | | DPSYFQNVTGCSNYYNFLRCTEPEDQLYYVKFLSLPEVRQAIH |
| | | | | VGNQTFNDGTIVEKYLREDTVQSVKPWLTEIMNNYKVLIYNGQ |
| | | | | LDIIVAAALTERSLMGMDWKGSQEYKKAEKKVWKIFKSDSEVA |
| | | | | GYIRQAGDFHQVIIRGGGHILPYDQPLRAFDMINRFIYGKGWD |
| | | | | PYVG |
| 587 | 1326 | 883 | 541 | RDERAKVPFRSTEG\GRRRRRRMEAVVFVFSLLDCCALIFLSV |
| | | | | YFIITLSDLECDYINARSCCSKLNKWVIPELIGHTEVTVLLLM |
| | | | | SLHWFIFLLNLPVATWNIYRYIMVPSGNMGVFDPTEIHNRGQL |
| | | | | KSHMKEAMIKLGFHLLCFFMYLYSMILALIND |
| 588 | 1327 | 1126 | 732 | QSPGHGAPCQLSSSHSRSNRLLSPMARATLSAAPSNPRLLRVA |
| | | | | LLLLLLVAASRRAAGAPLATELRCQCLQTLQGIHLKNIQSVKV |
| | | | | KSPGPHCAQTEVIATLKNGQKACLNPASPMVKKIIEKMLKNGK |
| | | | | SN |
| 589 | 1328 | 197 | 330 | HPLSLVFLALNTGKEKSHPGGGGERPGLAGQGEPDHPAGARDG |
| | | | | R |
| 590 | 1329 | 1 | 1575 | CTPVARSMATTATCTRFTDDYQLFEELGKGAFSVVRRCVKKTS |
| | | | | TQEYAAKIINTKKLSARDHQKLEREARICRLLKHPNIVRLHDS |
| | | | | ISEEGFHYLVFDLVTGGELFEDIVAREYYSEADASHCIHQILE |
| | | | | SVNHIHQHDIVHRDLKPENLLLASKCKGAAVKLADFGLAIEVQ |
| | | | | GEQQAWFGFAGTPGYLSPEVLRKDPYGKPVDIWACGVILYILL |
| | | | | VGYPPFWDEDQHKLYQQIKAGAYDFPSPEWDTVTPEAKNLINQ |
| | | | | MLTINPAKRITADQALKHPWVCQRSTVASMMHRQETVECLRKF |
| | | | | NARRKLKGAILTTMLVSRNFSAAKSLLNKKSDGGVKPQSNNKN |
| | | | | SLVSPAQEPAPLQTAMEPQTTVVHNATDGIKGSTESCNTTTED |
| | | | | EDLKVPRKQEIIKITEQLIEAINNGDFEAYTKKDPGLTSFEPE |
| | | | | ALGNLVEGMDFHKFYFENLLSKNSKPIHTTILNPHVHVIGEDA |
| | | | | ACIAYIRLTQYIDGQGRPRTSQSEETRVWHRRDGKWLNVHYHC |
| | | | | SGAPAAPLQ |
| 591 | 1330 | 17 | 636 | NRRTVKMLLELSEEHKEHLAFLPQVDSAVVAEFGRIAVEFLRR |
| | | | | GANPKIYEGAARKLNVSSDTVQHGVEGLTYLLTESSKLMISEL |
| | | | | DFQDSVFVLGFSEELNKLLLQLYLDNRKEIRTILSEL\APSLP |
| | | | | SYHNLEWRLDVQLASRSLRQQIKPAVTIKLHLNQNGDHNTKVL |
| | | | | QTDPATLLELVQQLEQALEEMKTNHCRVRIK |
| 592 | 1331 | 1 | 237 | GTSIYLAHRVA\RAWELAQFIHHTSKKADVVLACGDSIVHPED |
| | | | | LICCPLTGRSCLCDVHLLSSLLARLGRGYAVSLTNL |
| 593 | 1332 | 2506 | 1684 | RGCGSCGYKPSAGPAWRPRPPPAVSPLRHPEPAKVLSFSSCPL |
| | | | | PALGRTGPSRAARAQSLTMASLFKKKTVDDVIKEQNRELRGTQ |
| | | | | RAIIRDRAALEKQEKQLELEIKKMAKIGNKEACKVLAKQLVHL |
| | | | | RKQKTRTFAVSSKVTSMSTQTKVMNSQMKMAGAMSTTAKTMQA |
| | | | | VNKKMDPQKTLQTMQNFQKENMKMEMTEEMINDTLDDIFDGSD |
| | | | | DEEESQDIVNQVLDEIGIEISGKMAKAPSAARSLPSASTSKAT |
| | | | | ISDEEIERQLKALGVD |
| 594 | 1333 | 905 | 432 | STDGNGAERLFAELRKMNARGLGSELKDSIPVTELSASGPFES |
| | | | | HDLLRKGFSCVKNELLPSHPLELSEKNFQLNQDKMNFSTLRNI |
| | | | | QGLFAPLKLQMEFKAVQQVQRLPFLSSSNLSLDVLRGNDETIG |
| | | | | FEDILNDPSQSEVMGEPHLMVEYKLGLL |
| 595 | 1334 | 111 | 117 | RNMKLHYVAVLTLAILMFLTWLPESLSCNKALCASDVSKCLIQ |
| | | | | ELCQCRPGEGNCSCCKECMLCLGALWDECCDCVGMCNPRNYSD |
| | | | | TPPTSKSTVEELHEPIPSLFRALTEGDTQLNWNIVSFPVAEEL |
| | | | | SHHENLVSFLETVNQPHHQNVSVPSNNVHAPYSSDK/E*LPTV |
| | | | | DFFHSAPSCGLSM*SIIFFEET |
| 596 | 1335 | 817 | 278 | VGGVPTWLEGCGSGNPSPRSGGGPGARLTLPALQMTVHNLYLF |
| | | | | DRNGVCLHYSEWHRKKQAGIPKEEEYKLMYGMLFSIRSFVSKM |
| | | | | SPLDMKDGFLAFQTSRYKLHYYETPTGIKVVMNTDLGVGPIRD |
| | | | | VLHHIYSALYVELVVKNPLCPLGQTVQSELFRSRKDSYVRSLP |
| | | | | FFSARAG |
| 597 | 1336 | 171 | 881 | PGLSQEPSGSMETVVIVAIGVLATIFLASFAALVLVCRQRYCR |
| | | | | PRDLLQRYDSKPIVDLIGAMETQSEPSELELDDVVITNPHIEA |
| | | | | ILENEDWIEDASGLMSHCIAILKICHTLTEKLVAMTMGSGAKM |
| | | | | KTSASVSDIIVVAKRISPRVDDVVKSNYPPLDPKLLDARTTAL |
| | | | | LLSVSHLVLVTRNACHLTGGLDWIDQSLSAAEEHLEVLREAAL |
| | | | | ASEPDKGLPGPEGFLQEQSAI |
| 598 | 1337 | 1078 | 594 | VGMELPAVNLKVILLGHWLLTTWGCIVFSGSYAWANFTILALG |
| | | | | VWAVAQRDSIDAISMFLGGLLATIFLDIVHISIFYPRVSLTDT |
| | | | | GRFGVGMAILSLLLKPLSCCFVYHMYRERGGELLVHTGFLGSS |
| | | | | QDRSAYQTIDSAEAPADPFAVPEGRSQDRGY |
| 599 | 1338 | 717 | 116 | PASRPLLGPDTGSVANIFKGLVILPEMSLVIRNLQRVIPIRRA |
| | | | | PLRSKIEIVRRILGVQKFDLGIICVDNKNIQHINRIYRDRNVP |
| | | | | TDVLSFPFHEHLKAGEFPQPDFPDDYNLGDIFLGVEYIFHQCK |
| | | | | ENEDYNDVLTVTATHGLCHLLGFTHGTEAEWQQMFQKEKAVLD |
| | | | | ELRRRTGTRLQPLTPGPLPEGAEGRRF |
| 600 | 1339 | 1 | 804 | LRNALDVLHREVPRVLVNLVDFIMPTIMRQVFLGNPDKCPVQQ |
| | | | | A/MLEPLGSKTETLDLRAEMPITCPTQNEPFLRTPRNSNYTYP |
| | | | | IKPAIENWGSDFLCTEWKASNSVPTSVHQLRPADIKVVAALGD |
| | | | | SLTTAVGARPNNSSDLPTSWRGLSWSIGGDGNLETHTTLPNIL |
| | | | | KKFNPYLLGFSTSTWEGTAGLNVAAEGARARDMPAQAWDLVER |
| | | | | MKNSPDINLEKDWKLVTLFIGGNDLCHYCENPEAHLATEYVQH |
| | | | | IQQALDILSE |
| 601 | 1340 | 1 | 860 | VVEFLWSRRPSGSSDPRPRRPASKCQMMEERANLMHMMKLSIK |
| | | | | VLLQSALSLGRSLDADHAPLQQFFVVMEHCLKHGLKVKKSFIG |
| | | | | QNKSFFGPLELVEKLCPEASDIATSVRNLPELKTAVGRGRAWL |
| | | | | YLALMQKKLADYLKVLIDNKHLLSEFYEPEALMMEEEGMVIVG |
| | | | | LLVGLNVLDANL\CLKGEDLDSQVGVIDFSLYSKDVQDLDGGK |
| | | | | EHERITDVLDQKNYVEELNRHLSCTVGDLQTKIDGLEKTNSKL |
| | | | | QERVSAATDRKSLQEEQQQLREQNELL |
| 602 | 1341 | 60 | 762 | KPEGARRVQFVMGLFGKTQEKPPKELVNEWSLKIRKEMRVVDR |
| | | | | QIRDIQREEEKVKRSVKDAAKKGQKDVCIVLAKEMIRSRKAVS |
| | | | | KLYASKAHMNSVLMGMKNQLAVLRVAGSLQKSTEVMKAMQSLV |
| | | | | KIPEIQATMRELSKEMMKAGIIEEMLEDTFESMDDQEEMEEEA |
| | | | | EMEIDRILFEITAGALGKAPSKVTDALPEPEPPGAMAASEDEE |
| | | | | EEEEALEAMQSRLATLRS |
| 603 | 1342 | 3 | 456 | RWNSIMELALLCGLVVMAGVIPIQGGILNLNKMVKQVTGKMPI |
| | | | | LSYWPYGCHCGLGGRGQPKDATDWCCQTHDCCYDHLKTQGCGI |
| | | | | YKDYYRYNFSQGNIHCSDKGSWCEQQLCACDKEVAFCLKRNLD |
| | | | | TYQKRLRFYWRPHCRGQTPGC |
| 604 | 1343 | 249 | 632 | KTVAEEASVGNPEGAFMKMLQARKQHMSTELTIESEAPSDSSG |
| | | | | INLSGFGSEQLDTNDESDVSSALSYILPYLSLRNLGAESILLP |
| | | | | FTEQLFSNVQDGDRLLSILRRKSPSQSSLLGRKRIF |
| 605 | 1344 | 2 | 382 | LPLTLLLAAPFAHLLLPPGHDQSPCWHPGPALSPGTLGPLSWA |
| | | | | MANSGLQLLGYFLALGGWVGIIASTALPQWKQSSYAGDASIQL |
| | | | | RSKVFRESEWGGDSLGLPRDCGWSCLIMSARSEKGRS |
| 606 | 1345 | 2 | 987 | DPRVRPPLLQPPPPLLPRLVILKMAPLDLDKYVEIARLCKYLP |
| | | | | ENDLKRLCDYVCDLLLEESNVQPVSTPVTVCGDIHGQFYDLCE |
| | | | | LFRTGGQVPDTNYIFMGDFVDRGYYSLETFTYLLALKAKWPDR |
| | | | | ITLLRGNHESRQITQVYGFYDECQTKYGNANAWRYCTKVFDML |
| | | | | TVAALIDEQILCVHGGLSPDIKTLDQIRTIERNQEIPHKGAFC |
| | | | | DLVWSDPEDVDTWAISPRGAGWLFGAKVTNEFVHINNLKLICR |
| | | | | AHQLVHEGYKFMFDEKLVTVWSAPNYCYRCGNIASIMVFKDVN |
| | | | | TREPKKFRAVPDSERVIPPRTTTPYFL |
| 607 | 1346 | 10 | 768 | SFAGAAARPSTPPASGRGAAPGRPGPSPMDLRAGDSWGMLACL |
| | | | | CTVLWHKPAVPALNRTGDPGPGPSIQKTYDLTRYLEHQLRSLA |
| | | | | GTYLNYLGPPFNEPDFNPPRLGAETLPRATVDLEVWRSLNDKL |
| | | | | RLTQNYEAYSHLLCYLRGLNRQAATAELRRSLAHFCTSLQGLL |
| | | | | GSIAGVMAALGYPLPQPLPGTEPTWTPGPAHSDFLQKMDDFWL |
| | | | | LKELQTWLWRSAWFNRLKQPPARGRGF |
| 608 | 1347 | 114 | 700 | IKISLKKRSMSGISGCPFFLWGLLALLGLALVISLIFNISHYV |
| | | | | EKQRQDKMYSYSSDHTRVDEYYIEDTPIYGNLDDMISEPMDEN |
| | | | | CYEQMKARPEKSVNKMQEATPSAQATNETQMCYASLDHSVKGK |
| | | | | RRKPRKQNTHFSDKDGDEQLHAIDASVSKTTLVDSFSPESQAV |
| | | | | EENIHDDPLLFGLLAREPIN |
| 609 | 1348 | 2 | 807 | VEFHPQRARAGARAPSMGVLLTQRTLLSLVLALLFPSMASMAA |
| | | | | IGSCSKEYRVLLGQLQKQTDLMQDTSRLLDPYIRIQGLDVPKL |
| | | | | REHCRERPGAFPSEETLRGLGRRCFLQTLNATLGCVLHRLADL |
| | | | | EQRLPKAQDLERSGLNIEDLEKLQMARPNILGLRNNIYCMAQL |
| | | | | LDNSDTAEPTKARRGASQPPTPTPASDAFQRXLEGCRFLHGYH |
| | | | | RFMHSVGRVFSKWGESPNRSRRHSPHQALRKGVRRTRPSRKGK |
| | | | | RLMTRGQLPR |
| 610 | 1349 | 2 | 418 | DFPGRRFRLVWLLVLRLPWRVPGQLDPTTGRRFSEHKLCADDE |
| | | | | CSMLMYRGEALEDFTGPDCRFVNFKKGDPVYVYYKLARGWPEV |
| | | | | WAGSVGRTFGYFPKDLIQVVHEYTKEELQVPTNETDFVCFDGG |
| | | | | RDDFHNYNV |
| 611 | 1350 | 823 | 115 | SPLGKEGQEEVRVKIKDLNEHIVCCLCAGYFVDATTITECLHT |
| | | | | FCKSCIVKYLQTSKYCPMcNIKIHETQPLLNLKLDRVMQDIVY |
| | | | | KLVPGLQDSEEKRIREFYQSRGLDRVTQPTGEEPALSNLGLPF |
| | | | | SSFDHSKAHYYRYDEQLNLCLERLSSGKDKNKSVLQNKYVRCS |
| | | | | VRAEVRKLRRVLCHRLMLNPQHVQLLFDNEVLPDHMTMKQIWL |
| | | | | SRWFGKPSPLLLQYSVKEKRR |
| 612 | 1351 | 9 | 545 | LWWYSAHAAVDAMMDVFGVGFPSKVPWKKMSAEELENQYCPSR |
| | | | | WVVRLGAEEALRTYSQIGIEATTRARATRKSLLHVPYGDGEGE |
| | | | | KVDIYFPDESSEATTRARATRKSLLHVPYGDGEGEKVDIYFPD |
| | | | | ESSEALPFFLFFHGGYWQSGRHPGPHGRPGDPQRCVCPEAVSK |
| | | | | QQAPSW |
| 613 | 1352 | 49 | 902 | GVRMASRGRRPEHGGPPELFYDETEARKYVRNSRMIDIQTRMA |
| | | | | GRALELLYLPENKPCYLLDIGCGTGLSGSYLSDEGHYWVGLDI |
| | | | | SPAMLDEAVDREIEGDLLLGDMGQGIPFKPGTFDGCISISAVQ |
| | | | | WLCNANKKSENPAKRLYCFFASLFSVLVRGSRAVLQLYPENSE |
| | | | | QLELITTQATKAGFSGGMVVDYPNSAKAKKFYLCLFSGPSTFI |
| | | | | PEGLSENQDEVEPRESVFTNERFPLRMSRRGMVRKSRAWVLEK |
| | | | | KEPHRRQGREVRPDTQYTGRKRKPRF |
| 614 | 1353 | 1960 | 871 | TLICRMAGCGEIDHSINMLPTNRKANESCSNTAPSLTVPECAI |
| | | | | CLQTCVHPVSLPCKHVFCYLCVKGASWLGKRCAKCRQEIPEDF |
| | | | | LDKPTLLSPEELKAASRGNGEYAWYYEGRNGWWQYDERTSREL |
| | | | | EDAFSKGKKNTEMLIAGFLYVADLENMVQYRRNEHGRRRKIKR |
| | | | | DIIDIPKKGVAGLRLDCDANTVNLARESSADGADSVSAQSGAS |
| | | | | VQPLVSSVRPLTSVDGQLTSPATPSPDASTSLEDSFAHLQLSG |
| | | | | DNTAERSHRGEGEEDHESPSSGRVPAPDTSIEETESDASSDSE |
| | | | | DVSAVVAQHSLTQQRLLVSNANQTVPDRSDRSGTDRSVAGGGT |
| | | | | VSVSVRSRRPDGQCTVTEV |
| 615 | 1354 | 5653 | 4549 | GATPLGSVGGRTGKMDAATLTYDTLRFAEFEDFPETSEPVWIL |
| | | | | GRKYSIFTEKDEILSDVASRLWFTYRKNFPAIGGTGPTSDTGW |
| | | | | GCMLRCGQMIFAQALVCRHLGRDWRWTQRKRQPDSYFSVLNAF |
| | | | | IDRKDSYYSIHQIAQMGVGEGKSIGQWYGPNTVAQVLKKLAVF |
| | | | | DTWSSLAVHIAMDNTVVMEEIRRLCRTSVPCAGATAFPADSDR |
| | | | | HCNGFPAGAEVTNRPSPWRPLVLLIPLRLGLTDINEAYVETLK |
| | | | | HCFMMPQSLGVIGGKPNSAHYFIGYVGEELIYLDPHTTQPAVE |
| | | | | PTDGCFIPDESFHCQHPPCRMSIAELDPSIAVVRGGHLSTQAF |
| | | | | GAECCLGMTRKTFGFLRFFFSMLG |
| 616 | 1355 | 416 | 65 | PTTSNRAITLTAWPKIPFLGICEAKNPRSENMRLATILEVACH |
| | | | | HLGSGPPPSWELWEQGPPGNSSRYIEFLNKHTYIKGTLRVYTK |
| | | | | KFCMLVIKSFESKSCVCVYDFDSKSSVNVTV |
| 617 | 1356 | 2 | 382 | PRVRFRLLHVTSIRSAWILCGIIWILIMASSIMLLDSGSEQNG |
| | | | | SVTSCLELNLYKIAKLQTVNYIALVVGCLLPFFTLSICYLLII |
| | | | | RVLLKVEVPESGLRVSHRKALTTIIITLIIFFLCFLPYHT |
| 618 | 1357 | 3 | 672 | GRHWLGSAQLTDGGSARKPKMAVPAALILRESPSMKKAVSLIN |
| | | | | AIDTGRFPRLLTRILQKLHLKAESSFSEEEEEKLQAAFSLEKQ |
| | | | | DLHLVLETISFILEQAVYHNVKPAALQQQLENIHLRQDKAEAF |
| | | | | VNTWSSMGQETVEKFRQRILAPCKLETVGWQLNLQMAHSAQAK |
| | | | | LKSPQAVLQLGVNNEDSKSLEKVLVEFSHKELFDFYNKLETIQ |
| | | | | AQLDSLT |
| 619 | 1358 | 557 | 208 | EASSAKTKRKEEKGPKAKMKLMVLVFTIGLTLLLGVQAMPANR |
| | | | | LSCYRKILKDHNCHNLPEGVADLTQIDVNVQDHFWDGKGCEMI |
| | | | | CYCNFSELLCCPKDVFFGPKISFVIPCNNQ |
| 620 | 1359 | 335 | 1735 | KMAEAVFHAPKRKRRVYETYESPLPIPFGQDHGPLKEFKIFRA |
| | | | | EMINNNVIVRNAEDIEQLYGKGYFGKGILSRSRPSFTISDPKL |
| | | | | VAKWKDMKTNMPIITSKRYQHSVEWAAELMRRQGQDESTVRRI |
| | | | | LKDYTKPLEHPPVKRNEEAQVHDKLNSGMVSNMEGTAGGERPS |
| | | | | VVNGDSGKSGGVGDPREPLGCLQEGSGCHPTTESFEKSVREDA |
| | | | | SPLPHVCCCKQDALILQRGLHHEDGSQHIGLLHPGDRGPDHEY |
| | | | | VLVEEAECAMSEREAAPNEELVQRNRLICRRNPYRIFEYLQLS |
| | | | | LEEAFFLVYALGCLSIYYEKEPLTIVKLWKAFTVVQPTFRTTY |
| | | | | MAYHYFRSKGWVPKVGLKYGTDLLLYRKGPPFYHASYSVIIEL |
| | | | | VDDHFEGSLRRPLSWKSLAALSRVSVNVSKELMLCYLIKPSTM |
| | | | | TDKEMESPECMKRIKVQEVILSRWVSSRERSDQDDL |
| 621 | 1360 | 5693 | 4435 | RDIWTMNLQRYWGEIPISSSQTNRSSFDLLPREFRLVEVHDPP |
| | | | | LHQPSANKPKPPTMLDIPSEPCSLTIHTIQLIQHNRRLRNLIA |
| | | | | TAQAQNQQQTEGVKTEESEPLPSCPGSPPLPDDLLPLDCKNPN |
| | | | | APFQIRHSDPESDFYRGKGEPVTELSWHSCRQLLYQAVATILA |
| | | | | HAGFDCANESVLETLTDVAHEYCLKFTKLLRFAVDREAPLGQT |
| | | | | PFPDVMEQVFHEVGIGSVLSLQKFWQHRIIWYHSYMLQISKQL |
| | | | | SEEYERIVNPEKATEDAKPVKIKEEPVSDITFPVSEELEADLA |
| | | | | SGDQSLPMGVLGAQSERFPSNLEVEASPQASSAEVNASPLWNL |
| | | | | AHVKMEPQESEEGNVSGHGVLGSDVFEEPMSGMSEAGIPQSPD |
| | | | | DSDSSYGSHSTDSLMGSSPVFNQRCKKRMRKI |
| 622 | 1361 | 15 | 678 | REQILFIEIRDTAXGGETEQPPSLSPLHGGRMPEMGEGIQSLA |
| | | | | RETQSHRGRRQGWDATWVTRCRESLNRGGAGAGKPAGALAHHV |
| | | | | FLALIEPNLAEREASEEEVKACSDETVVADLLVKVVYVLGAIL |
| | | | | KIFLREGNVLNQHSGMDIEKYSEHYQHDHSPGAEDDAAGGQLR |
| | | | | PTAQERRHKEGSRGSPRCKRARKAVGESPGCPRPRVRPRVRPR |
| | | | | VRPRV |
| 623 | 1362 | 1080 | 835 | GTRGCCREGTAYAKAYQFMASHLSLGKPVSTGSIPRFNKARLR |
| | | | | KQAKCKPNHYSFIGLSMLSPENFSIGCKYSVWFSETKGF |
| 624 | 1363 | 872 | 441 | GAQGVRVGIGEVGRVQAPRVSLLHSQGVPRGGTGEAVKEEGRG |
| | | | | SSLHPPLPPQGLGEYAACQSHAFMKGVFTFVTGTGMAFGLQMF |
| | | | | IQRKFPYPLQWSLLVAVVAGSVVSYGVTRVESEKCNNLWLFLE |
| | | | | TGQLPKDRSTDQRS |
| 625 | 1364 | 1 | 585 | GTSELLCIQRWNWGPAFPPRPGLALAPTLQLLVEMGSAKAVPV |
| | | | | TPARPPPHNKHLARVADPRSPSAGILRTPIQVESSPQPGLPAG |
| | | | | EQLEGLKHAQDSDPRSPLGKN*GHGWQVGQGSDLGSPQPLPPS |
| | | | | ASHL/YSSRASRCSQPPCLSLPWFGVRSSPANTYHVPVTSLCP |
| | | | | SPALHYTAKQAGIISTSQARAPR |
| 626 | 1365 | 36 | 381 | PLLLPRFIDIPCLLCYLTQVTPDDMYAKAFLIKPNTAITGTDR |
| | | | | RKL\RADETTDFP\TLGTDQIYELLPGKDELNIVKSNAHKRDA |
| | | | | *TAYVSGENHILSEP*KNLYPAVNTLSSYP |
| 627 | 1366 | 763 | 1003 | SRQPPPLLTMVFLLEFLFLVFFPGCVNQLLLSYPWQGQGTSLW |
| | | | | SSLSFHWLLPQEDSSRLSIFPLRAGSPPQPAQAPQRI |
| 628 | 1367 | 296 | 1199 | KSREQSSLFAADAERSWGGKSCCLLRWRFVGKASHFPRLLPLP |
| | | | | GEERPETKERAWKMEQTWTRDYFAEDDGEMVPRTSHTA/ASVS |
| | | | | LTAPLSDTKDRGPPVQSQIWRSGEKVPFVQTYSLRAFEKPPQV |
| | | | | QTQALRDFEKHLNDLKKENFSLKLLIYFLEEPMQQKYEASRED |
| | | | | IYKRNTELKVEVESLKRELQDKKQHLDKTWADVENLNSQNEAE |
| | | | | LRRQFEERQQEMEHVYELLENKMQLLQEESRLAKNEAARMAAL |
| | | | | VEAEKECNLELSEKLKGVTKNWEDVPGDQVKPDQYTEAKAQRD |
| | | | | K |
| 629 | 1368 | 191 | 1116 | TRRRGTTWRSPRPRRASTSRPSTRPRGVASWPWETAGTATTGP |
| | | | | GPSARTRRRAARRRRSRPRRRAHGGLSQPRGWQSLLSFTILFL |
| | | | | AWLAGFSSRLFAVIRFESIIHEFDPWFNYRSTHHLASHGFYEF |
| | | | | LNWFDERAWYPLGRIVGGTVYPGLMITAGLIHWILNTLNITVH |
| | | | | IRDVCVFLAPTFSGLTSISTFLLTRELWNQGAGLLAACFIAIV |
| | | | | PGYISRSVAGSFDNEGIAIFALQFTYYLWVKSVKTGSVFWTMC |
| | | | | CCLSYFYMVSAWGGYVFIINLIPLHAFVLVLM/Q/RYSKRVYI |
| | | | | *YSTRIVG |
| 630 | 1369 | 852 | 214 | RRLIVVLSDAFLSRAWCSHSF/RVGPARGWVGPSVAPTPLTVP |
| | | | | PRREGLCRLLELTRRPIFITFEGQRRDPAHPALRLLRQHRHLV |
| | | | | TLLLWRPGSVTPSSDFWKEVQLAKPRKVRYRPVEGDPQTQLQD |
| | | | | DKDPMLILRGRVPEGRALDSEVDPDPEGDLGVRGPVFGEPSAP |
| | | | | PHTSGVSLGESRSSEVDVSDLGSRNYSARTDFYCLVSKDDM |
| 631 | 1370 | 246 | 1091 | LSHEGWRRGREGERINSSVASLAPLCILPDLPSNMHLARLVGS |
| | | | | CSLLLLLGALSGWAASDDPIEKVIEGINRGLSNAEREVGKAID |
| | | | | GINSGITHAGREVEKVFNGLSNMGSHTGKELDKGVQGLNHGMD |
| | | | | KVAHEINHGIGQAGKEAEKLGHGVNNAAGQAGKEADKAVQGFH |
| | | | | TGVHQAGKEAEKLGQGVNHAADQAGKEVEKLGQGAHHAAGQAG |
| | | | | KELQNAHNGVNQASKEANQLLNGNHQSGSSSHQGGATTTPLAS |
| | | | | GASVNTPFINLPALWRSVANIMP |
| 632 | 1371 | 3150 | 2792 | SASGGLGMTVEGPEGSEREILPPEKPPRPPRPLHLSDRSFRRK |
| | | | | KDSVESHPTWVDDTRIDADAIVEKIVQSQDFTDGSNTEDSNKR |
| | | | | LFVSRDGSATLSGIQLATRVSSGVYEPWIESH |
| 633 | 1372 | 667 | 993 | ERSGWPQPEGTVTAQGPLFWERLSGAVTVSSGYKADMWPSFPQ |
| | | | | \VRVGSFLFGILFFSFGSSSLPPGLPPPASLLCCAVQWGARAL |
| | | | | FLPCLKERALGMEMRNNTLSFRQ |
| 634 | 1373 | 636 | 2 | SSSNLRLSFLINENILGKCFRSGPSCAGPRISPLAAQYECPRP |
| | | | | SLLIMASVPKTNKIEPRSYSIIPSCGI\RRLGPALNTLIF\QS |
| | | | | KRFGPRG\HSAKSIEGAPRGKGRGRAVARLAADRPPAPKIQLR |
| | | | | AF*LQQL*YTLLELELPRLLAPDLPSNGSSLKDLKWTHSNYRA |
| | | | | SKESCIVIF\VTTSPGREWVKALAAFLGCGS\LSQAPSPES |
| 635 | 1374 | 61 | 519 | LRIINTYFCFKFLIVNYIHGTTKARKPHVLGESLISAMSRQEP |
| | | | | KMFVLLYVTSFAICASGQPRGNQLKGENYSPRYICSIPGLPGP |
| | | | | PGPPGPNGSPGPHGRIGLPGRDGRDGRKGEKGEKGTAGLRGKT |
| | | | | GPLGLAGEKGDQGETGKKGPIGPE |
| 636 | 1375 | 129 | 579 | FASAMLGSRVDRPKLSVAPSVVLEEDQVKVSPAVDLEAGCRLR |
| | | | | DFTEKIMNVKGKVILSMLVVSTVIIVFWEFINSTEGSFLWIYH |
| | | | | SKNPEVDDSSAQKGWWFLSWFNNGIHNYQOGEEDIDKEKGREE |
| | | | | TKGRKMTQQSFGYGTGLIQT |
| 637 | 1376 | 127 | 1376 | GSHRFSLASPLDPEVGPYCDTPTMRTLFNLLWLALACSPVHTT |
| | | | | LSKSDAKKAASKTLLEKSQFSDKPVQDRGLVVTDKKAESVVLE |
| | | | | HRSYCSAKARDRHFAGDVLGYVTPWNSHGYDVTKVFGSKFTQI |
| | | | | SPVQLQLKRRGREMFEVTGLHDVDQGWMRAVRKHAKGLHIVPR |
| | | | | LLFEDWTYDDFRNVLDSEDEIEELSKTVVQVAKNQHFDGFVVE |
| | | | | VWNQLLSQKRVGLIHMLTHLAEAKHQARLLALLVIPPAITPGT |
| | | | | DQLGMFTHKEFEQLAPVLDGFSLMTYDYSTAHQPGPNAPLSWV |
| | | | | RACVQVLDPKSKWRSKILLGLNFYGMDYATSKDAREPVVGARY |
| | | | | IQTLKDHRPRMVWDSQVSEHFFEYKKSRSGRHVVFYPTLKSLQ |
| | | | | VRLELARELGVGVSIWELGQGLDYFYDLL |
| 638 | 1377 | 998 | 48 | GREGTGWGPAMSEVTRSLLQRWGASFRRGADFDSWGQLVEAID |
| | | | | EYQILARHLQKEAQAQHNNSEFTEEQKKTIGKIATCLELRSAA |
| | | | | LQSTQSQEEFKLEDLKKLEPILKNILTYNKEFPFDVQPVPLRR |
| | | | | ILAPGEEENLEFEEDEEEGGAGAGSPDSFPARVPGTLKPRKPS |
| | | | | EPGMTLLTIRIEKIGLKDAGQCINPYITVSVKDLNGIDLTPVQ |
| | | | | DTPVASRKEDTYVHFNVDIELQKHVEKLTKGAAIFFEFKHYKP |
| | | | | KKRFTSTKCFAFMENDEIKLGPIVIELYKKPTDFKRKQLQLLT |
| | | | | KKPLYLHLHQTLHKE |
| 639 | 1378 | 1298 | 1569 | GSITSEPSLDSLQPLPPGFKRFSCLSLPSSWDYPRPPPGLAYF |
| | | | | CIFSRDEVSPCWPGCSPSPDLMIRLPRPPSVGITGVSHRAWPT |
| | | | | IDNF |
| 640 | 1379 | 196 | 1197 | KMPVPWFLLSLALGRSPVVLSLERLVGPQDATHCSPGLSCRLW |
| | | | | DSDILCLPGDIVPAPGPVKAPTHLQTELVLRCQKETDCDLCLR |
| | | | | VAVHLAVHGHWEEPEDEEKFGGAADSGVEEPRNASLQAQVVLS |
| | | | | FQAYPTARCVLLEVQVPAALVQFGQSVGSVVYDCFEAALGSEV |
| | | | | RIWSYTQPRYEKELNHTQQLPDCRGLEVWNSIPSCWALPWLNV |
| | | | | SADGDNVHLVLNVSEEQHFGLSLYWNQVQGPPKPRWHKNLVRP |
| | | | | PPSQVHSHCRP\CLCK\DAVPYQRGSLKRTHPKQGKIGGGTSA |
| | | | | FLVSLTLASSSSSLSSPTSFLYLFHRLDRRSLP |
| 641 | 1380 | 756 | 1110 | LRLWNRNQMMHNIIVKELIVTFFLGITVVQMLISVTGLKGVEA |
| | | | | QNGSESEVFVGKYETLVFYWPSLLCLAFLLGRFLHMFVKALRV |
| | | | | HLGWELQVEEKSVLEVHQGEHVKQLLRIPRP |
| 642 | 1381 | 631 | 1278 | KVNRKLRKKGKISHDKRKKSRSKAIGSDTSDIVHIWCPEGMKT |
| | | | | SDIKELNIVLPEFEKTHLEHQQRIESKVCKAAIATFYVNVKEQ |
| | | | | FIKMLKESQMLTNLKRKNAKMISDIEKKRQRMIEVQDELLRLE |
| | | | | PQLKQLQTKYDELKERKSSLRNAAYFLSNLKQLYQDYSDVQAQ |
| | | | | EPNVKETYDSSSLPALLFKARTLHGAESHLRNINHQLEKLLDQ |
| | | | | G |
| 643 | 1382 | 1167 | 755 | VWVAMEEPPVREEE*EEGEEDEERDEVGPEGAKGKSPFQLTAE |
| | | | | DVYDISYLLGRELMALGSDPRVTQLQFKVVRVLEMLEALVNEG |
| | | | | SLALEELKMERDHLRKEVEGLRRQSPPASGEWPDSTKRRPRRK |
| | | | | KRKRCCGY |
| 644 | 1383 | 1 | 271 | PRNDHRLTQSRRDSSSKTRAFLVPRFLPAHAGVTSEERTAMKR |
| | | | | EGGAADLCSDSLPESQQQDGNHAPNFSSHGSCRPRQRRRHDKA |
| | | | | LHAR |
| 645 | 1384 | 1 | 499 | THASEKSRATMSSWSRQRPKSPGGIQPHVSRTLFLLLLLAASA |
| | | | | WGVTLSPKDCQVFRSDHGSSISCQPPAEIPGYLPADTVHLAVE |
| | | | | FFNLTHLPANLLQGASKLQELHLSSNGLESLSPEFLRPVPQLR |
| | | | | VLDLTRNALTGLPPGLFQASATLDTLVLKENQLEVLE |
| 646 | 1385 | 178 | 675 | ERPRIMDLAGLLKSQFLCHLVFCYVFIASGLIINTIQLFTLLL |
| | | | | WPINKQLFRKINCRLSYCISSQLVMLLEWWSGTECTIFTDPPA |
| | | | | YLKYGKENAIVVLNHKF\EI\DFLCGWSLSERFGLLGVSQKCI |
| | | | | PPCLTHFFGSAPPLVFLLLVIQNLQKNQQSFYLMKWS |
| 647 | 1386 | 630 | 1499 | MIVFGWAVFLASRSLGQGLLLThEEHIAHFLGTGGAATTMGNS |
| | | | | CICRDDSGTDDSVDTQQQQAENSATPTADTRSQPRDPVRPPRR |
| | | | | GRGPHEPRRKKQNVDGLVLDTLAVIRTLVDNDQEPPYSMITLH |
| | | | | EMAETDEGWLDVVQSLIRVIPLEDPLGPAVITLLLDECPLPTK |
| | | | | DALQKLTEILNLNGEVACQDSSHPAKHRNTSAVLGCLAEKLAG |
| | | | | PASIGLLSPGILEYLLQCLLQSHPTVMLFAKIALEKFAQTSEN |
| | | | | KLTISESSISDRL\VTLESW\ANDPDYLKRQVG |
| 648 | 1387 | 1 | 962 | RFGTRGLAKSKGVVLMALCALTRALRSLNLAPPTVAAPAPSLF |
| | | | | PAAQMMNNGLLQQPSALMLLPCRPVLTSVALNANFVSWKSRTK |
| | | | | YTITPVKMRKSGGRDHTGRIRVHGIGGGHKQRYRMIDFLRFRP |
| | | | | EETKSGPFEEKVIQVRYDPCRSRDIALVAGGSRKRWIIATENM |
| | | | | QAGDTILNSNHIGRMAVAAREGDAHPLGALPVGTLINNVESEP |
| | | | | GRGAQYIRAAGTCGVLLRKVNGTAIIQLPSKRQMQVLETCVAT |
| | | | | VGRVSNVDHNKRVIGKAGRNRWLGKRPNSGRWHRKGGWAGRKI |
| | | | | RPLPPMKSYVKLPSASAQS |
| 649 | 1388 | 291 | 714 | PVQGARCWLDARRRVRVFSGVCCGCGIHGYWAEPCGGCGAMEG |
| | | | | LRSSVELDPELTPGKLDEEMVGLPPHDASPQVTFHSLDGKTVV |
| | | | | CPHFMGLLLGLLLLLTLSVRNQLCVRGERQLAETLHSQVKEKS |
| | | | | QLIGKKTDCRD |
| 650 | 1389 | 874 | 2220 | GARGRPLAETWPFLTAPVLPGQLQITEPTMAEKGDCIASVYGY |
| | | | | DLGGRFVDFQPLGFGVNGLVLSAVDSRACRKVAVKKIALSDAR |
| | | | | SMKHALREIKIIRRLDHDNIVKVYEVLGPKGTDLQGELFKFSV |
| | | | | AYIVQEYMETDLARLLEQGTLAEEHAKLFMYQLKRGLKYIHSA |
| | | | | NVLHRDLKPANIFISTEDLVLKIGDFGLARIVDQHYS\EKGYL |
| | | | | SEGLVTKWYRSPRLLLSPNNYTKAIDMWAAGCILAEMLTGRML |
| | | | | FAGAHELEQMQLILETIPVIREEDKDELLRVMPSFVSSTWEVK |
| | | | | RPLRKLLPEVNSEAIDFLEKILTFNPMDRLTAEMGLQHPYMSP |
| | | | | YSCPEDEPTSQHPFRIEDEIDDTVLMAANQSQLSNWDTCSSRY |
| | | | | PVSLSSDLEWRPDRCQDASEVQRDPRAGSAPLAENVQVDPRKD |
| | | | | SHSSSASCQAGRNGVSRYQ |
| 651 | 1390 | 1 | 2451 | MRTLGTCLATLAGLLLTAAGETFSGGCLFDEPYSTCGYSQSEG |
| | | | | DDFNWEQVTLTKPTSDPWMPSGSFMILVNASGRPEGQRAHLLL |
| | | | | PQLKENDTHCIDFHYFVSSKSNSPPGLLNVYVKVNNGPLGNPI |
| | | | | WNISGDPTRTNNPAELAISTFWPNFYQVIFEVITSGHQGYLAI |
| | | | | DEVKVLGHPCTRTPHFLRIQNVEVNAGQFATFQCSAIGRTVAG |
| | | | | DRLWLQGIDVRDAPLKEIKVTSSRRFIASFNVVNTTKRDAGKY |
| | | | | RCMI\RTEGGVGISNYAEL\VVKEPPVPIAPPQLASVGATYLW |
| | | | | IQLNANSINGDGPIVAREVEYCTASGSWNDRQPVDSTSYKIGH |
| | | | | LDPDTEYEISVLLTRPGEGGTGSPGPAKRTRTKCADPMRGPRK |
| | | | | LEVVEVKSRQITIRWEPFGYNVTRCHSYNLTVHYCYQVGGQEQ |
| | | | | VREEVSWDTENSHPQHTITNLSPYTNVSVKLIKMNPEGRKESQ |
| | | | | ELIVQTDEDLPGAVPTESIQGSTFEEKIFLQWREPTQTYGVIT |
| | | | | LYEITYKAVSSFDPEIDLSNQSGRVSKLGNETHFLFFGLYPGT |
| | | | | TYSFTIRASTAKGFGPPATNQFTTKISAPSMPAYELETPLNQT |
| | | | | DNTVTVMLKPAHSRGAPVSVYQIVVEEERPRRTKKTTEILKCY |
| | | | | PVPIHFQNASLLNSQYYFAAEFPADSLQAAQPFTIGDNKTYNG |
| | | | | YWNTPLLPYKSYRIYFQAASRANGETKIDCVQVATKGAATPKP |
| | | | | VPEPEKQTDHTVKIAGVIAGILLFVIIFLGVVLVMKKRLYKHG |
| | | | | ASICSASGEASGSFQSWRKAKHKQACPMARAGARERAGGCLKL |
| 652 | 1391 | 30 | 459 | GIRQLLQLSRASMAARKSWTALRLCATVVVLDMVVCKGFVQDL |
| | | | | DESFKENPNDDIWLVHFYAPWCGHCKKLEPIWNEAGLEMKSIG |
| | | | | SPVKAGKMDATSYSSIASEFGVRGYPTIKLALIRPLPSQQMFE |
| | | | | HMHKRHRVFFVYV |
| 653 | 1392 | 168 | 1016 | GLVIVISHFSPSPGLLPATQSPAMSDPITLNVGGKLYTTSLAT |
| | | | | LTSFPDSMLGAMFSGKMPTKRDSQGNCFIDRDGKVFRYILNFL |
| | | | | RTSHLDLPEDFQEMGLLRREADFYQVQPLIEALQEKEVELSKA |
| | | | | EKNAMLNITLNQRVQTVHFTVREAPQIYSLSSSSMEVFNANIF |
| | | | | STSCLFLKLLGSKLFYCSNGNLSSITSHLQDPNHLTLDWVANV |
| | | | | EGLPEEEYTKQNLKRLWVVPANKQINSFQVFVEEVLKIAKSDG |
| | | | | FCIDSSHPHALDFMNNKILLLY |
| 654 | 1393 | 3 | 927 | SCADNLVAASGGCWFVLGERPAGSLLSASYGTFAMPGMVKFGR |
| | | | | RWAIASDDLVFPGFFELVVRVLWWIGILTLYLMHRGKLDCAGG |
| | | | | ALLSSYLIVLMILLAVVICTVSAIMCVSMRGTICNPGPRKSMS |
| | | | | KLLYIRLALFFPEMVWASLGAAWVADGVQCDRTVVNGIIATVV |
| | | | | VSWIIIAATVVSIIIVFDPLGGKMAPYSSAGPSHLDSHDSSQL |
| | | | | LNGLKTAATSVWETRIKLLCCCIGKDDHTRVAFSSTAELFSTY |
| | | | | FSDTDLVPSDIARGLALLHQQQDNIRNNQ\DLPRWSAMPQGAP |
| | | | | PKLLWMQN |
| 655 | 1394 | 1 | 716 | FRAATAAAKGNGGGGGRAGAGDASGTRKKKGPGPLATAYLVIY |
| | | | | NVVMTAGWLVIAVGLVRAYLAKGSYHSLYYSIEKPLKFFQTGA |
| | | | | LLEILHCAIGIVPSSVVLTSFQVMSRVFLIWAVTHSVKEVQSE |
| | | | | DSVL\FVIAWTITEIIRYSFYTFSLLNHLPYLIKRARYTLFIV |
| | | | | LYPMGVSGELLTIYAALPFVRQAGLYSISLPNSTKKIFLISQV |
| | | | | WWHMLAVSADAKAAEMPAVLKPGP |
| 656 | 1395 | 72 | 766 | MLTGVGCLVSSESLSCVQCNSWEKSCVNSIASECPSHANTSCI |
| | | | | SSSASSSLETPVRLYQNMFCSAENCSEETHITAFTVHVSAEEH |
| | | | | FHFVSQCCEGKECSNTSDMRDPPLKNVSSNRECPACYESNGTS |
| | | | | CRGKPWKCYEEEQCVFLVAELKNDIESKSLVLKGCSNRSNATC |
| | | | | QFLSGENKTLGGVIFRKFECLNVNSLTPTSAPTTSHNVGSKAS |
| | | | | LYLLALASLLLRGLLP |
| 657 | 1396 | 97 | 746 | VPARRRAMEIGTEISRKIRSAIKGKLQELGAYVDEELPDYIMV |
| | | | | MVANKKSQDQMTEDLSLFLGNNTIRFTVWLHGVLDKKRSVTTE |
| | | | | PSSLKSSDTNIFDSNVPSNKSNFSRGDERRHEAAVPPL\AIPS |
| | | | | ARPEKRDSRVSTSSQESKTTNVRQTYDDGAATRLMSTV/KPLR |
| | | | | EPAPSEDVIDIKPEPDDLIDEDLNFVQEKPLSQKKPTVTLTYG |
| | | | | SSR |
| 658 | 1397 | 155 | 560 | ASRVLAAVMGLPWGQPHLGLQMLLLALNWLRPSLSLELVPYTP |
| | | | | QITAWDLEGKVTATTFSLEQPRCVFDGLASASDTVWLVVAFSN |
| | | | | ASRGFQNPETLADIPASPQLLTDGHYMTLPLSPDQLPCGDPMA |
| | | | | GSGSAP |
| 659 | 1398 | 416 | 539 | NSLNNFFFETESCCVAQAGVQWRDLGSLQAPPPGFRFSCL |
| 660 | 1399 | 281 | 736 | KSLPLQKHPKPSCQEDQGLGRGSLSGHSPLTLLTFLTSCALGD |
| | | | | QQLLPPRTSGSLCQESMSEQSCQMSELRLLLLGKCRSGKSATG |
| | | | | NAILGKHVFKSKFSDQTVIKMCQRESWVLRERKVVVIDTPDLF |
| | | | | SSIACAEDKQRNIQHLLELSAP |
| 661 | 1400 | 2 | 974 | FVETTVSVQSAESSDALSWSRLPRALASVGPEEARSGAPVGGG |
| | | | | PWQLSDRVEGGSPTLGLLGGSPSAQPGTGNVEAGIPSGRMLEP |
| | | | | LPCWDAAKDLKEPQCPPGDRVGVQPGNSRVWQGTMEKAGLAWT |
| | | | | RGTGVQSEGTWESQRQDSDALPSPELLPQDQDKPFLRKACSPS |
| | | | | NIPAVIITDMGTQEDGAKEETQGSPRGNLPLRKLSSSSASSTG |
| | | | | FSSSYEDSEEDISSDPERTLDPNSAFLHTLDQQKPRVVESRSV |
| | | | | TQAGVQWHDIGSLQPLPP/WIQAIL/HASAFRIAGTTGACHHA |
| | | | | RIIFGFLVERGFHRVGQDGLYLLIL |
| 662 | 1401 | 232 | 3 | KICSSYFLRIICILQKEAQEASNLYTSCDFFSPAFYFVIYRLY |
| | | | | NFKIHWPGAVAHTYSPSTLGGRGRWVT*GREFM |
| 663 | 1402 | 250 | 556 | LILSLPLLYGHLKSYTFPSEHYLHLLQTFATFNKYLNVCVLIF |
| | | | | IHHKPVVPAIQGTNVGGSLEPRRLRLQQAMIVPLHFGLGNRVR |
| | | | | PCLKKQQQQQQQQQKK |
| 664 | 1403 | 1 | 373 | RMETKPVITCLKTLLIIYSFVFWITGVILLAAGVWGKLTLGSY |
| | | | | ISLIAENSTYAPYVLIVTGTTIVAYPLV*FFFSYSSGFSYILA |
| | | | | VRLIAGIALVYNYIPRSSSRAKVRLVVLLRFLLSRHPS |
| 665 | 1404 | 3 | 413 | NAEHPGMDRHDLCQKAKLAEHAERDDDMAACMKTVTDQGAELS |
| | | | | NEERNLLSDAHTNAV*ARRSSWMGA*RIEQKTEGADTQQQMAP |
| | | | | DCREIFATELRDICDDVLSLLEKKLIPNASHA*SLVYYLHMIG |
| | | | | DYYRYWK |
| 666 | 1405 | 2 | 334 | GGGPLGKMPRAQLADPWQMMAVESPSDCADNGQQIMREPMGED |
| | | | | EISPQTE*VSIKEVAVTHCVKEGHDKADPSQIELLRVLRQGSL |
| | | | | GKVYLGKKVSGSDAKQLYAMKVLT |
| 667 | 1406 | 2 | 332 | DAAGIRHEAHFGKLECLVQLVRAGA\SLFVSTTRYAQTPA\HI |
| | | | | AAFGGHPQCLVWLIQAGANINKPDCEGETPIHKAARSGSLECI |
| | | | | SALVANGAHVDNPKKGLVLEWLFE |
| 668 | 1407 | 242 | 1157 | LLKLMFIAELGDYDLAEHSPELVSEFRFVPIQTEEMELAIFEK |
| | | | | WKEYRGQTPAQAETNYLNKAKWLEMYGVDMHVVKARDGNDYSL |
| | | | | GLTPTGVLVFEGDTKIGLFFWPKITRLDFKKNKLTLVVVEDDD |
| | | | | QGKEQEHTFVFRLDHPKACKHLWKCAVEHHAFFRLRGPVQKSS |
| | | | | HRSGFIRLGSRFRYSGKTEYQTTKTNKARRSTSFERRPSKRYS |
| | | | | RRTLQMKACATKPEELSVHNNVSTQSNGSQQAWGMRSALPVSP |
| | | | | SISSAPVPVEIENLPQSPGTDQHDRKWLSAASDCCQRGGNQWN |
| | | | | TRAL |
| 669 | 1408 | 278 | 1 | ATAPGLFNFF*FLFQCREEHKKKNPEVPVNFAEFSKKCSGRWK |
| | | | | TMSSKEKFKFGEMAKADEVCYDREMKDYGPAKGGKKKDPNAPK |
| | | | | RPPSGF |
| 670 | 1409 | 139 | 646 | AEGLGSWAVWAGLGWAGRHMEAGGATGALGVGSKLPSAFCFPG |
| | | | | SSVAMDMFQKVEKIGEGTYGVVYKAKNRETGQLVALKKIRLDL |
| | | | | *VTGRPLSYPPWAITTWALPDPFPLSWSPRLTPLGAAQQPLPV |
| | | | | LSPVHCLLTSLCRGPDCGVWWMTCQGAQVSIAGALVILWG |
| 671 | 1410 | 3 | 442 | LCVSVLCSFSYLQNGWTASDPVHGYWFR\AGDHVSRNIPVATN |
| | | | | NPVRAVQEETRDRFHLLGDPQNKDCTLSIRDTRESDAGTYVFC |
| | | | | VERGNMKWNYKYDQLSVNVTASQDLLSRYRLEVPESVTVQEGL |
| | | | | CVSVP/WQCPLPPLQLDCL |
| 672 | 141 | 184 | 836 | QLQLCQNCTKRGECHCVPFDTYIKTKKEKKRLSVLPPTRLMEA |
| | | | | RFSPINQILPWCRQDLAISISKAINTQEAPVKEKHARRIILGT |
| | | | | HHEKGAFTFWSYAIGLPLPSSSILSWKFCHVLHKVLRDGHPNV |
| | | | | LHDCQRYRSNIREIGDLWGHLHDRYGQLVNVYTKLLLTKISFH |
| | | | | LKHPQFPAGLEVTDEVLEKAAGTDVNNM*VTLHGYMASSPRLP |
| | | | | HSFLPRLTPRRPHGAVGLNESVALLVDAHAPRDRG |
| 673 | 1412 | 307 | 664 | AAPHRMPRAPHFMPLLLLLLLLSLPHTQAAFPQDPLPLRISDL |
| | | | | QGTSPLSWLPSLEDDAVAA*LGLDFQRFLTLNRTLLVAARDHV |
| | | | | FSFDLQAEEEGEGLVPNKYLTWRSQDVENCAVR*KLTLNRTLL |
| | | | | VAARDHFSFDLQAEEEGEGLVPNKYLTWRSQDVENCAVR |
| 674 | 1413 | 24 | 420 | HLVPKTRGRGTPSGDQSPVLTLTP*GDPPTILGPQTNQPKEHL |
| | | | | TNFKSGKRSFHSLLQPLLLLLHPSISPFLNFGSFPFLVETEET |
| | | | | CFIHKLKTPAKVTPDSLPLVFNHCGDACLIIHPHFRDVEFHHT |
| | | | | GN |
| 675 | 1414 | 1 | 1101 | CCSTKNISGDKACNLMIFDTRKTARQPNCYLFFCPNEEACPLK |
| | | | | PAKGLMSYRIITDFPSLTRNLPSQELPQEDSLLHGQFSQAVTP |
| | | | | LAHHHTDYSKPTDISWRDTLSQKFGSSDHLEKLFKMDEASAQL |
| | | | | LAYKEKGHSQSSQFSSDQEIAHLLPENVSALPATVAVASPHTT |
| | | | | SATPKPATLL\PTNASVTPSGTSQPQLA\TTAPPVTTVTSQPP |
| | | | | TTLISTVFTRAAATLQAMATTAVLTTTFQAPTDSKGSLETIPF |
| | | | | TEISNLTKNTGNVYNPTALSMSNVESSTMNKTASWEGREASPG |
| | | | | SSSQGSVPENRYGLPFEKWLLIGSLLFGVLFLVIGLVLLGRIL |
| | | | | SESLRRKRYSRLDYLINGLLVDI |
| 676 | 1415 | 178 | 621 | IFAGSGVMRLKISLLKEPKEQELVSCVGWTTAEELYSCSDDHH |
| | | | | IVKRNLLTSETTQIVKLPDDIYPIDFHWFPKSLGVKKQTHAES |
| | | | | FVLTSSDGKFHLISKLGRVEKSVEAHCGAVLAGRWNYEGTALV |
| | | | | TVGEDGQI*IWSKTGMLIS |
| 677 | 1416 | 1258 | 944 | RRATTKRHFILLFLFFLRRC\LFLSPRMECNGAILAHCNLHLP |
| | | | | GSSSSSASAS*VAGITDVRHHAQLILFVFLVETGFHRVGQAGL |
| | | | | KLLTSGDLLTSASQSAGIIMGISHCAQPKKAF*TKTF |
| 678 | 1417 | 876 | 1291 | EAGSNDDLAT*KTCGRARPSSRSRQFGSRVWNHRQGVRSSPGE |
| | | | | GAGSRSPCRRRHRRKHRRNVQSP*RRRSRSCSRRSGRCSVALL |
| | | | | GACPVAGHSRGKVVCRRAHAITQRRRCCGFDPMVHPKEHRG*R |
| | | | | ERSRKWSRS |
| 679 | 1418 | 262 | 539 | ATAPGLFNFF*FLFQCREEHKKKNPEVPVNFAEFSKKCSGRWK |
| | | | | TMSSKEKFKFGEMAKADEVCYDREMKDYGPAKGGKKKDPNAPK |
| | | | | RPPSGF |
| 680 | 1419 | 104 | 236 | LTVNYVLVFSRDSGLRAIENLMQKKGKFDYILLETTGLADPGK |
| | | | | K |
| 681 | 1420 | 3 | 277 | HEAALCRTRAVAAERHFLRVFLFFRPFRGVGTESGSESGSSKA |
| | | | | KEPRTPSSSYGTAQYRRWPIAQEYKHCTAHNDTGTLCSELREP |
| | | | | WRRPQ |
| 682 | 1421 | 3 | 576 | EGSSQANTLRSRKENRRNLLACLESHVLR*QFTESELCSLMGD |
| | | | | NPFQPKSNSKMAELFMECEEEELEPWQKKVKEVEDDDDDEPIF |
| | | | | VGEISSSKPAISNILNRVNPSSYSRGLKNGALSRGITAAFKPT |
| | | | | SQHYTNPTSNPVPASPINFHPESRSSDSSVIGQPFSKPVSVSK |
| | | | | TLPAQGSIGCCLSISTV |
| 683 | 1422 | 6 | 627 | CFSLEDILNFFLQGFSAGLFAFYHDKDGNPLTSRFADGLPPFN |
| | | | | YSLGLYQWSDKVVRKVERLWDVRDNKIVRHTVYLLVTPRVVEE |
| | | | | ARKHFDCPVLEGMELENQGGVGTELNHWEKRLLENEAMTGSHT |
| | | | | QNRVLSRITLAKMEDTGRQMLSPYCDTLRSNPLQLTCRQDQRA |
| | | | | VAV\CNLQKFPKPLPQEYQYFDELSGIPAEDLPYYG |
| 684 | 1423 | 1 | 1272 | AARRRRQLVSRRRTAE\YPRDRRSSPSARPPDVPGQQPKAAKS |
| | | | | PSPVQGKKSPRLLCIEKVTTDKDPKEEKEEEDDSAKPQEVSIA |
| | | | | ASRPSRGWRSSRTSVSRHRDTENTRSSRSKTGSLQLICKSEPN |
| | | | | TDQLDYDVGEEHQSPGGISSEEEEEEEEEMLISEEEIPFKDDP |
| | | | | RDETYKPHLERETPKPRRKSGKVKEEKEKKEIKVEVEVEVKEE |
| | | | | ENEIREDEEPPRKRGRRRKDDKSPRLPKRRKKPPIQYVRCEME |
| | | | | GCGTVLAHPRYLQHHIKYQHLLKKKYVCPHPSCGRLFRKQKQL |
| | | | | LRHAKHHTDQRDYICEYCARAFKSSHNLAVHRMIHTGEKPLQC |
| | | | | EICGFTCRQKASLNWHMKKHDADSFYQFSCNICGKKFEKKDSV |
| | | | | VAHKAKSHPEVLIAEALAANAGALITSTDILGTNPES |
| 685 | 1424 | 56 | 526 | MTANRLAESLLALSQQEELADLPKDYLLSESEDEGDNDGERKH |
| | | | | QKLLEAISSLDGKNRRKLAERSEASLKVSEFNVSSEGSGEKLV |
| | | | | LADLLEPVKTSSSLATVKKQLSRVKSKKTVELPLNKEEIERIH |
| | | | | REVAFNKTAQVLSKWDPVVLLRQAEQL* |
| 686 | 1425 | 132 | 344 | RIDFMFHSSAMVNSHRKPMFNIHRGFYCLTAILPQICICSQFS |
| | | | | VPSSYHFTEDPGAFPVATNGERFPWQELRLPSVVIPLHYDLFV |
| | | | | HPNLTSLDFVASEKIEVLVSNATQLIILHSKDLEITNATLQSE |
| | | | | EDSRYMKPGKELKVLSYPAHEQIALLVPEKLTPHLKYYVAMDF |
| | | | | QAKLGDGFEGFYKSTYRTLGGETRILAVTDFEPTQARMAFPCF |
| | | | | DEPLFKPINFSIKLRESRHIALSNMPKVKTIELEGGLLEDHFE |
| | | | | TTVKMSTYLVAYI/DL*FPLMGNDFLGRS |
| 687 | 1426 | 3 | 678 | RSKIPRSDPRVRTPAPAEAEQGKSQCPSGSTAQSWSAMDILVP |
| | | | | LLQLLVLLLTLPLHLMALLGCWQPLCKSYFPYLMAVLTPKSNR |
| | | | | KMESKKRELFSQIKGLTGASGKVAKLELGCGTGANFQFYPPGC |
| | | | | RVTCLDPNPHFEKFLTKSMAENRHLQYERFVVAPGEDMRQLAD |
| | | | | GSMDVVVCTLVLCSVQSPRKVLQEVRRVLRPGGVLFFWEHVAE |
| | | | | PYGSWAFMW |
| 688 | 1427 | 240 | 641 | RKQNSSLMDPKLGRMAASLLAVLLLLLLERGMFSSPSPPPALL |
| | | | | EKVFQYIDLHQDEFVQTLKEWVAIESDSVQPVPRFRQELFRMM |
| | | | | AVAADTLQRLGARVASVDMGPQQLPDGQSLPIPPVILAELGSD |
| | | | | PTKG |
| 689 | 1428 | 1 | 116 | FFFFEMESCSVTQAGVPWHDLSSLQPPPPRFKRFSCLS |
| 690 | 1429 | 75 | 511 | DPKAQLPEPLRVLWTAHLVAMAPGSRTSLLLAFALLCLPWLQE |
| | | | | AGAVQTVPLSRLFDHAMLQAHRAHQLAIDTYQEFEETYIPKDQ |
| | | | | KYSFLHDSQTSFCFSDSIPTPSNMEETQQKSNLELLRISLLLI |
| | | | | ESWLEPVRILMSIVPN |
| 691 | 1430 | 2 | 1364 | FVKLIKKHQAAMEKEAKVMSNEEKKFQQHIQAQQKKELNSFLE |
| | | | | SQKREYKLRKEQLKEELNENQSTPKKEKQEWLSKQKENIQHFQ |
| | | | | AEEEANLLRRQRQYLELECRRFKRRMLLGRHNLEQDLVREELN |
| | | | | KRQTQKDLEHAMLLRQHESMQELEFRHLNTIQKMRCELIRLQH |
| | | | | QTELTNQLEYNKRRERELRRKHVMEVRQQPKSLKSKELQIKKQ |
| | | | | FQDTCKIQTRQYKALRNHLLETTPKSEHKAVLKRLKEEQTRKL |
| | | | | AILAEQYDHSINEMLSTQALRLDEAQEAECQVLKMQLQQELEL |
| | | | | LNAYQSKIKMQAEAQHDRELRELEQRVSLRRALLEQKIEEEML |
| | | | | ALQNERTERIRSLLERQAREIEAFDSESMRLGFSNMVLSNLSP |
| | | | | EAFSHSYPGASGWSHNPTGGPGPHWGHPMGGPPQAWGHPMQGG |
| | | | | PQPWGHPS\GPMQ\GVPR/GSSMGVR |
| 692 | 1431 | 50 | 504 | LAHGSFGVSDFPAPAAAPAHTLTSFSGSLSPQFRKPLGRAPAM |
| | | | | PLVRYRKVVILGYRCVGKTSLAHQFVEGEFSEGYDPTVENTYS |
| | | | | KIVTLGKDEFHKHLVDTAGQDEYSILPYSFIIGVHGYVLVYSV |
| | | | | TSLHSFQVIESLYQKLHEGHGK |
| 693 | 1432 | 130 | 1671 | SSPSRELCFYGFWIASSWWSRWVGSLGPGILPSPPARGRTFAS |
| | | | | VSRLPPPWSAGITLTPFLICQSGSVCPGLGAGFGVRSFHHPVA |
| | | | | RSAVLLLPLAPAAAQDSTQASTPGSPLSPTEYERFFALLTPTW |
| | | | | KAETTCRLRATHGCRNPTLVQLDQYENHGLVPDGAVCSNLPYA |
| | | | | SWFESFCQFTHYRCSNHVYYAKRVLCSQPVSILSPNTLKETEA |
| | | | | SAEVSPTTMTSPISPHFTVTERQTFQPWPERLSNNVEELLQSS |
| | | | | LSLGGQEQAPEHKQEQGVEHRQEPTQEHKQEEGQKQEEQEEEQ |
| | | | | EEEGKQEEGQGTKEGREAVSQLQTDSEPKFHSESLSSNPSSFA |
| | | | | PRVREVESTPMIMENIQELIRSAQEIDEMNEIYDENSYWRNQN |
| | | | | PGSLLQLPHTEAKLVLCYSIVENTCIITPTAKAWKYMEEEILG |
| | | | | FGKSVCDSLGRRHMSTCALCDFCSLKLEQCHSEASLQRQQCDT |
| | | | | SHKTPFVSPLLASQSLSIGNQVGSPESGRFYGLDLYGGLHM |
| 694 | 1433 | 517 | 578 | VSWVPSKDGDVEGARRPFTRLNTSLGPGLQEGRRRTWLVPIPG |
| | | | | AVLPGRTQEQPRASPLY*PGAPPCQPQGLVAGPWAQ*AGLRSD |
| | | | | GFGPWPW\RLVGTAGPREKKVQKSKCWHFRCGRHPARRSGWAG |
| | | | | RHASLLATGRPCSSAPSQQPLGTAGDSRQELLRPPLV*VNGAQ |
| | | | | SSAAGDWGSSPRTAQALARPHRLGHHPAAVAPAARLRTQSGHS |
| | | | | PRGPLCRSPGSPRRMGTWRGPAGHSHD |
| 695 | 1434 | 249 | 632 | KTVAEEASVGNPEGAFMKMLQARKQHMSTELTIESEAPSDSSG |
| | | | | INLSGFGSEQLDTNDESDVSSALSYILPYLSLRNLGAESILLP |
| | | | | FTEQLFSNVQDGDRLLSILKNNRKSPSQSSLLGNKFKNKIF |
| 696 | 1435 | 333 | 881 | GECFIMAAVVQQNDLVFEFASNVMEDERQLGDPAIFPAVIVEH |
| | | | | VPGADILNSYAGLACVEEPNDMITESSLDVAEEEIIDDDDDDI |
| | | | | TLTVEASCHDGDETIETIEAAEALLNMDSPGPMLDEKRINNNI |
| | | | | FSSPEDDMVVAPVTHVSVTLDGIPEVMETQQVQEKYADSPGAS |
| | | | | SPEQPKRKKK |
| 697 | 1436 | 3 | 466 | HEASGVSRALLQSAPGTPATVGISVGELWPFARCCSHSYVRSL |
| | | | | RGLSVSTHLLCFTIYIMNPSMKQKQEEIKENIKTSSVPRRTLK |
| | | | | MIQPSASGSLVGRENELSAGLSKRKHRNDHLTSTTSSPGVIVP |
| | | | | ESSENKNLGRVTQESFDLMIKGMK |
| 698 | 1437 | 50 | 241 | PLPARGKSTLPATFCSPSAPELASMSVVPPNRSQTGWPRGVTQ |
| | | | | FGNKYIQQTKPLTLERTINL |
| 699 | 1438 | 1 | 422 | AEGEDVPPLPTSSGDGWEKDLEEALEAGGCDLETLRNIIQGRP |
| | | | | LPADLRAKVWKIALNVAGKGDSLASWDGILDLPEQNTIHKDCL |
| | | | | QFIDQLSVPEEKAAELLLDIESVITFYCKSRNIKYSTSLSWIH |
| | | | | LLKPLVHLQL |
| 700 | 1439 | 161 | 413 | ALPKFLTHGVKSNERVVVWLFPPSFRAATMVHMNVLPDALKSI |
| | | | | NNAERRGKPQVLLLCSKIIIWFLTVMVKYGYIGKFEPTRP |
| 701 | 1440 | 211 | 977 | AMAQYGHPSPLGMAAREELYSKVTPRRNRQQRPGTIKHGSALD |
| | | | | VLLSMGFPRARAQKALASTGGRSVQAACDWLFSHVGDPFLDDP |
| | | | | LPREYVLYLRPTGPLAQKLSDFWQQSKQICKGKNKAHNIPHIT |
| | | | | LCQFFMCEDSKVDALGEALQTTVSRWKCKFSAPLPLELYTSSN |
| | | | | FIGLFVKEDSAEVLKKFAADFAAEAASKTEVHVEPHKKQLHVT |
| | | | | LAYHFQASHLPTLEKLAQNIDVKLGCDWVATIFSRDLFA |
| 702 | 1441 | 3 | 408 | QTRPASPRTARESVLGVSQNMSFNLQSSKKLFIFLGKSLFSLL |
| | | | | EAMIFALLPKPRKNVAGEIVLITGAGSGLGRLLALQFARLGSV |
| | | | | LVLWDINKEGNEETCKMAREAGATRVHAYTCDCSQKEGVYRVA |
| | | | | DQVKK |
| 703 | 1442 | 708 | 244 | MVARKGQKSPRFRRVTCFLRLGRSTLLELEPAGRPCSGRTRHR |
| | | | | ALHPRLVACVTVSSRRHRKEAGRGRAESFIAVGMAAPSMKERQ |
| | | | | VCWGARDEYWKCLDENLEDASQCKKLRSSFESSCPQQWIKYFD |
| | | | | KRRDYLKFKEKFEAGQFEPSETTAKS |
| 704 | 1443 | 3 | 475 | PAPAARSRELLKELRNGQDMDTVVFEDVVVDFTLEEWALLNPA |
| | | | | QRKLYRDVMLETFKHLASVDNEAQLKASGSISQQDTSGEKLSL |
| | | | | KQKIEKFTRKNIWASLLGKNWEEHSVKDKHNTKERHLSRNPRV |
| | | | | ERPCKSSKGNKRGRTFRKTRNCNRHLRR |
| 705 | 1444 | 276 | 437 | CVCGFFVCFETKSCFVAQAGVQWHNLSSLQALPPGFKQFSCLS |
| | | | | LLSSWHYRRV |
| 706 | 1445 | 2 | 322 | GTRLRRRREAVWFEVVNMDFSRLHMYSPPQCVPENTGYTYALS |
| | | | | SSYSSDALDFETEHKLDPVFDSPRMSRRSLRLATTACTLGDGE |
| | | | | AVGADSGTSSAVSLKNRAAR |
| 707 | 1446 | 123 | 410 | DTMQAVVPLNKMTAISPEPQTLASTEQNEVPRVVTSGEQEAIL |
| | | | | RGNAADAESFRQRFRWFCYSEVAGPRKALSQLWELCNQWLRPD |
| | | | | IHTKE\QILE |
| 708 | 1447 | 2 | 384 | PICLFSRPTLRPSRSKVSLIEGRGANMAARWRFWCVSVTMVVA |
| | | | | LLIVCDVPSASAQRKKEMVLSEKVSQLMEWTNKRPVIRMNGDK |
| | | | | FRRLVKAPPRNYSVIVMFTALQLHRQCWCRELQLRFKIK |
| 709 | 1448 | 104 | 535 | QMRVKDPTKALPEKAKRSKRPTVPHDEDSSDDIAVGLTCQHVS |
| | | | | HAISVNHVKRAIAENLWSVCSECLKERRFYDGQLVLTSDIWLC |
| | | | | LKCGFQGCGKNSESQHSLKHFKSSRTEPHCIIINLSTWIIWWY |
| | | | | EWDEKIFTPLNKKG |
| 710 | 1449 | 116 | 479 | AKERGEERQGEGGGWLSGSRWPLVRSAFVPAPSSLILSMCLSP |
| | | | | GIPEAAPDSPLTASAPTP*VMLLGDTGVGKTCFLIQFKDGAFL |
| | | | | SGTFIATVGIDFRVRWLQALASSREPGLWLRHGGV |
| 711 | 1450 | 2 | 232 | FYPRSSADLPFQTTRCEFQTSVMELAHSLLLNEEALAQITEAK |
| | | | | RPVFIFEWLRFLDKLVARNCSFFPRT |
| 712 | 1451 | 105 | 393 | MNMKQKSVYQQTKALLCKNFLKKWRMKRESLLEWGLSILLGLC |
| | | | | IALFSSSMRNVQFPGMAPQNLGRVDKFNSSSLMVVYTPISNLT |
| | | | | QQIMNTAL |
| 713 | 1452 | 2 | 525 | SPQGNGCPDVTGDSVIRVPLTLLVHNLAGLTGLLHHCLSGPLP |
| | | | | APSPPPAMSSSRKDHLGASSSEPLPVIIVGNGPSGICLSYLLE |
| | | | | GYTPYTKPDAIHPHPLLQRKLTEAPGVSILDQDLDYLSEGLEG |
| | | | | RSQSPVALLFDALLRPDTDFGGNMKSVLTWKHRKEHAIPHVVL |
| | | | | GR |
| 714 | 1453 | 2 | 1557 | NRRTRAQRCQRGRSCGAREEEEPGTARKPPPAASAMDASLEKI |
| | | | | ADPTLAEMGKNLKEAVKMLEDSQRRTEEENGKKLISGDIPGPL |
| | | | | QGSGQDMVSILQLVQNLMHGDEDEEPQSPRIQNIGEQGHMALL |
| | | | | GHSLGAYISTLDKEKLRKLTTRILSDTTLWLCRIFRYENGCAY |
| | | | | FHEEEREGLAKICRLAIHSRYEDFVVDGFNVLYNKKPVIYLSA |
| | | | | AARPGLGQYLCNQLGLPFPCLCRVPCNTVFGSQHQMDVAFLEK |
| | | | | LIKDDIERGRLPLLLVANAGTAAVGHTDKIGRLKELCEQYGIW |
| | | | | LHVEGVNLATLALGYVSSSVLAAAKCDSMTMTPGPWLGLPAVP |
| | | | | AVTLYKHDDPALTLVAGLTSNKPTDKLRALPLWLSLQYLGLDG |
| | | | | FVERIKHACQLSQRLQESLKKVNYIKILVEDELSSPVVVFRFF |
| | | | | QELPGSDPVFKAVPVPNMTPSGVGRERHSCDALNRWLGEQLKQ |
| | | | | LVPASGLTVMDLEAEGTCLRFSPLMTAAGKPGLVDIPCFCSGA |
| | | | | AG |
| 715 | 1454 | 319 | 873 | LCIMDTKEEKKERKQSYFARLKKKKQAKQNAETASAVATRTHT |
| | | | | GKEDNNTVVLEPDKCNIAVEEEYMTDEKKKRKSNQLKEIRRTE |
| | | | | LKRYYSIDDNQNKTHDKKEKKMVVQKPHGTMEYTAGNQDTLNS |
| | | | | IALKFNITPNKLVELNKLFTHTIVPGQVLFVPDANSPSSTLRL |
| | | | | SSSSPGATVSPSS |
| 716 | 1455 | 60 | 681 | SAGGDSCRAVPMLRFPTCFPSFRVVGEKQLPQEIIFLVWSPKR |
| | | | | DLIALANTAGEVLLHRLASFHRVWSFPPNENTGKEVTCLAWRP |
| | | | | DGKLLAFALADTKKIVLCDVEKPESLHSFSVEAPVSCMHWMEV |
| | | | | TVESSVLTSFYNAEDESNLLLPKLPTLPKNYSNTSKIFSEENS |
| | | | | DEIIKLLGDVRLNILVLGGSSGFIELYAYGMFKI |
| 717 | 1456 | 357 | 658 | PRDPVTDRARAMPRRGLVAGPDLEYFQRHYFTPAEVAQHNRPE |
| | | | | DLWVSYLGRVYDLTSLAQEYKGNLLLKPIVEVAGQDISHWFDP |
| | | | | KTRDVSYAGTWDCG |
| 718 | 1457 | 2 | 481 | RIPGRRFRAAFVLGSANVASSVRLRCSFPLSLGGPSGPAAASV |
| | | | | ALGPAGPGRSLGRTPDTGDWENDSVSFEDVAVAFTQEEWALLD |
| | | | | PSQKNLYRDVMQEIFRNLASVGNKSEDQNIQDDFKNPGRNLSS |
| | | | | HVVERLFEIKEGSQYGETFSQDSNLNLNKI |
| 719 | 1458 | 6 | 469 | SLSLSVSPFLRLSLGRVGGMAEEMESSLEASFSSSGAVSGASG |
| | | | | FLPPARSRIFKIIVIGDSNVGKTCLTYRFCAGRFPDRTEATIG |
| | | | | VDFRERAVEIDGERIKIQLWDTAGQERFRKSMVQHYYRNVHAV |
| | | | | VFVYDMTNMASFHSLPSWIEECKQH |
| 720 | 1459 | 82 | 490 | RRPSPGSIVIMAAESDVLHFQFEQQGDVVLQKMNLLRQQNLFC |
| | | | | DVSIYINDTEFQGHKVILAACSTFMRDQFLLTQSKHVRITILQ |
| | | | | SAEVGRKLLLSCYTGALEVKRKELLKYLTAASYLQMVHIAEKR |
| | | | | TEAFVKF |
| 721 | 1460 | 48 | 708 | AEGLQSAAGIRIDTKAGPPEMLKPLWKAAVAPTWPCSMPPRRP |
| | | | | WDRQAGTLQVLGALAVLWLGSVALICLLWQVPRPPTWGQVQPK |
| | | | | DVPRSWEHGSSPAWEPLEAEARQQPDSCQLVLVESIPQDLPSA |
| | | | | AGSPSAQPLGQAWLQLLDTAQESVHVASYYWSLTGPDIGVNDS |
| | | | | SSQLGEALQQLLGRNISLAVATSSPTLARTSTDLQRR |
| | | | | RGAH |
| 722 | 1461 | 436 | 677 | RKKKMPLPFGLKLKPTRRYTVSSKSCLVARIQLLNNEFVEFTL |
| | | | | SVESTGQESLEAVAQRLELREVTYFSLWYYNKQNQRR |
| 723 | 1462 | 45 | 569 | LQPLSSWESASEVTRSPVSPEDVKQATSNFENLQKQLARKMKL |
| | | | | PIFIADAFTARAFRGNPAAVCLLENELDEDMHQKIAREMNLSE |
| | | | | TAFIRKLHPTDNFAQSSCFGLRWFTPASEVPLCGHATLASAAV |
| | | | | LFHKIKNMNSTLTFVTLSGELRARPRAEDGIVLDLPLYPRPQD |
| | | | | FHE* |
| 724 | 1463 | 79 | 530 | AADTMQSDDVIWDTLGNKQFCSFKIRTKTQSFCRNEYSLTGLC |
| | | | | NRSSCPLANSQYATIKEEKGQCYLYMKVIERAAFPRRLWERVR |
| | | | | LSKNYEKALEQIDENLIYWPRFIRHKCKQRFTKITQYLIRIRK |
| | | | | LTLKRQRKLVPLSKKVERREK |
| 725 | 1464 | 2 | 261 | FVERGLGDPALPTLMFEEPEWAEAAPVAAGLGPVISRPPPAAS |
| | | | | SQNKVSDSREQWELFQAAKRTLVDPSAVCIAGRDTCGTVKGES |
| 726 | 1465 | 1 | 860 | VVEFLWSRRPSGSSDPRPRRPASKCQMMEERANLMHMMKLSIK |
| | | | | VLLQSALSLGRSLDADHAPLQQFFVVMEHCLKHGLKVKKSFIG |
| | | | | QNKSFFGPLELVEKKCPEASDIATSVRNLPELKTAVGRGRAWL |
| | | | | YLALMQKKLRDYLKVLIDNKHLLSEFYEPEALMMEEEGMVIVG |
| | | | | LLVGLNVLDANL\CLKGEDLDSQVGVIDFSLYLKDVQDLDGGK |
| | | | | EHERITDVLDQKNYVEELNRHLSCTVGDLQTKIDGLEKTNSKL |
| | | | | QERVSAATDRKSLQEEQQQKREQNELIR |
| 727 | 1466 | 69 | 452 | GCYAPSPHLGGSLTPRFFPNGVFHRRLPRPRPPQPPSVSSAPT |
| | | | | LRPLCAHFSLGKLRKRVRKSAEVAPPRTEKGWGSAEPRHSRAP |
| | | | | LGLQGLRMAASAQVSVTFEDVAVTFTQEEWGQLDAAQRTLY |
| 728 | 1467 | 1 | 439 | FRGSLSSPSSLRGRRLVTGQTSPRGTWCLYPGFCRSVACAMPC |
| | | | | CSHRSCREDPGTSESREMDPVVFEDVAVNFTQEEWTLLDISQK |
| | | | | NLFREVMLETFRNLTSIGKKWSDQNIEYERQNPPRSFRSLIEE |
| | | | | KVNEIKEDSHCGETFTQ |
| 729 | 1468 | 103 | 236 | LNFANSAAFAVTMPQNEYIELHRXRYGFRLDYHEKKRKKQSRE |
| | | | | A |
| 730 | 1469 | 213 | 809 | SGDLSPAELMMLTIGDVIKQLIEAHEQGKDIDLNKVKTKTAAK |
| | | | | YGLSAQPRLVDIIAAVPPQYRKVLMPKLKAKPIRTASGIAVVA |
| | | | | VMCKPHRCPHISFTGNICVYCPGGPDSDFEYSTQSYTGYEPTS |
| | | | | MRAIRARYDPFLQTRHRIEQLKQLGHSVDKVEFIEMGGTFMAL |
| | | | | PEEYRDYFLNLHDALSGHTSNNIYE |
| 731 | 1470 | 264 | 799 | WESDVGEGLRPPPPPPPPGRRRTQEPRARDAATVIFACPAALL |
| | | | | ETLIAYGSSSPSFCKHRAARPLIFLLHRLTAEATARCPICALE |
| | | | | ARNPGRWGICASWPGMKTPFGKAAAGQRSRTGAGHGSVSVTMI |
| | | | | KRKAAHKKRRSRPTSQPRGNIVGCIIQHGWKDGDEPLTQWKGT |
| | | | | VLDQLL |
| 732 | 1471 | 2 | 763 | EDLGVAKEAFQWAPAGDCGSGAGRAGGEGVDAGRRVPERQHRG |
| | | | | RGGGGEPGPRQRGGRRQ\RSSSRRSGGDGGDEVEGSGVGAGEG |
| | | | | ETVQHFPLARPKSLMQKLQCSFQTSWLKDFPWLRYSKDTGLMS |
| | | | | CGWCQKTPADGGSVDLPPVGHDELSRGTRNYKKTLLLRHHVST |
| | | | | EHKLHEANAQESEIPSEEGYCDFNSRPWENSYCYQLLRQLNEQ |
| | | | | RKKGILCDVSIVVSGKIFKAHKNILVAGSRFFKTLYCFS |
| 733 | 1472 | 82 | 523 | SLRAAAAMADVTARSLQYEYKRNSNLVLQADRSLIDRTRRDEP |
| | | | | TGEVLSLVGKLEGTRMGDKAQRTKPQMQEERRAKRRKRDEDRH |
| | | | | DINKMKGYTLLSEGIDEMVGIIYKPKTKETRETYEVLLSFIQA |
| | | | | ALGDQPRDILCGAADEVL |
| 734 | 1473 | 536 | 110 | CNSAESRNDVLFVAIFAVPLILGQEYEDEERLGEDEYYQVVYY |
| | | | | YTVTPSYDDFSADFTIDYSIFESEDRLNRLDKDITEAIETTIS |
| | | | | LETARADHPKPVIVKPVTTEPQSP\DL\NDAVSS\LRSPIPL\ |
| | | | | LLS\CAFVQVGMYFM |
| 735 | 1474 | 2 | 557 | FVRGPGEEQAPAFRKPAPGAMGAQVRLPPGEPCREGYVLSLVC |
| | | | | PNSSQAWCEITNVSQLLASPVLYTDLNYSINNLSISANVENKY |
| | | | | SLYVGLVLAVSSSIFIGSSFILKKKGLLQLASKGFTRAGQGGH |
| | | | | SYLKEWLWWVGLLSILSNNAREKVDL*NITF*PQTSCIFFTIT |
| | | | | IEKSTFLSYFPTS |
| 736 | 1475 | 127 | 401 | ARGSCPTRPRPANGRMAETKDAAQMLVTFKDVAVTFTREEWRQ |
| | | | | LDLAQRTLYREVMLETCGLLVSLGHRVPKPELVHLLKHGQELW |
| | | | | IVKRG |
| 737 | 1476 | 311 | 790 | YTMLRGTMTAWRGMRPEVTLACLLLATAGCFADLNEVPQVTVQ |
| | | | | PASTVQKPGGTVILGCVVEPPRNNVTWRLNGKELNGSDDALGV |
| | | | | LITHGTLVITALNNHTVGRYQCVARMPAGAVASVPATVTLASE |
| | | | | SAPLPPCHGAVPPHLSHPEAPTIHAASCYS |
| 738 | 1477 | 2 | 421 | WGRRRQLVSEAARAQGDPVCSTMSEEEAAQIPRSSVWEQDQQN |
| | | | | VVQRVVALPLVRATCTAVCDVYSAAKDRHPLLGSACRLAENCV |
| | | | | CGLTTRALDHAQPLLEHLQPQLATMNSLACRGLDKLEEKLPFL |
| | | | | QQPSETVVTS |
| 739 | 1478 | 256 | 1250 | AKAFTMAESPGCCSVWARCLHCLYSCHWRKCPPERMQTSKCDC |
| | | | | IWFGLLFLTFLLSLSWLYIGLVLLNDLHNFNEFLFRRWGHWMD |
| | | | | WSLAFLLVISLLGTYASLLLVLALLLRLCRQPLHLHSLHKVLL |
| | | | | LLIMLLVAAGLVGLDIQWQQERHSLRVSL/QDCR*L*TPAVRP |
| | | | | *EESGEGHWRRAHLTSSCPQATAPFLHIGAAAGIALLAWPVAD |
| | | | | TFYRIHRREPKILLLLKFFGVVLVIYLAPLCISSPCIMEPRDL |
| | | | | PPKPGLVGHRGAPMLAPENTLMSLRKTAECGATVFETDVMVSS |
| | | | | DGVPFLMHDEHLSRTTNVASVFPTRITAHSS |

What is claimed is:

1. An isolated polynucleotide comprising a nucleotide sequence selected from the group consisting of SEQ ID NO: 1-739, a mature protein coding portion of SEQ ID NO: 1-739, an active domain of SEQ ID NO: 1-739, and complementary sequences thereof.

2. An isolated polynucleotide encoding a polypeptide with biological activity, wherein said polynucleotide hybridizes to the polynucleotide of claim 1 under stringent hybridization conditions.

3. An isolated polynucleotide encoding a polypeptide with biological activity, wherein said polynucleotide has greater than about 90% sequence identity with the polynucleotide of claim 1.

4. The polynucleotide of claim 1 wherein said polynucleotide is DNA.

5. An isolated polynucleotide of claim 1 wherein said polynucleotide comprises the complementary sequences.

6. A vector comprising the polynucleotide of claim 1.

7. An expression vector comprising the polynucleotide of claim 1.

8. A host cell genetically engineered to comprise the polynucleotide of claim 1.

9. A host cell genetically engineered to comprise the polynucleotide of claim 1 operatively associated with a regulatory sequence that modulates expression of the polynucleotide in the host cell.

10. An isolated polypeptide, wherein the polypeptide is selected from the group consisting of:
(a) a polypeptide encoded by any one of the polynucleotides of claim 1; and
(b) a polypeptide encoded by a polynucleotide hybridizing under stringent conditions with any one of SEQ ID NO: 1-739.

11. A composition comprising the polypeptide of claim 10 and a carrier.

12. An antibody directed against the polypeptide of claim 10.

13. A method for detecting the polynucleotide of claim 1 in a sample, comprising:
a) contacting the sample with a compound that binds to and forms a complex with the polynucleotide of claim 1 for a period sufficient to form the complex; and
b) detecting the complex, so that if a complex is detected, the polynucleotide of claim 1 is detected.

14. A method for detecting the polynucleotide of claim 1 in a sample, comprising:
a) contacting the sample under stringent hybridization conditions with nucleic acid primers that anneal to the polynucleotide of claim 1 under such conditions;
b) amplifying a product comprising at least a portion of the polynucleotide of claim 1; and
c) detecting said product and thereby the polynucleotide of claim 1 in the sample.

15. The method of claim 14, wherein the polynucleotide is an RNA molecule and the method further comprises reverse transcribing an annealed RNA molecule into a cDNA polynucleotide.

16. A method for detecting the polypeptide of claim 10 in a sample, comprising:
a) contacting the sample with a compound that binds to and forms a complex with the polypeptide under conditions and for a period sufficient to form the complex; and
b) detecting formation of the complex, so that if a complex formation is detected, the polypeptide of claim 10 is detected.

17. A method for identifying a compound that binds to the polypeptide of claim 10, comprising:
a) contacting the compound with the polypeptide of claim 10 under conditions sufficient to form a polypeptide/compound complex; and
b) detecting the complex, so that if the polypeptide/compound complex is detected, a compound that binds to the polypeptide of claim 10 is identified.

18. A method for identifying a compound that binds to the polypeptide of claim 10, comprising:
a) contacting the compound with the polypeptide of claim 10, in a cell, under conditions sufficient to form a polypeptide/compound complex, wherein the complex drives expression of a reporter gene sequence in the cell; and
b) detecting the complex by detecting reporter gene sequence expression, so that if the polypeptide/compound complex is detected, a compound that binds to the polypeptide of claim 10 is identified.

19. A method of producing the polypeptide of claim 10, comprising,
a) culturing a host cell comprising a polynucleotide sequence selected from the group consisting of a polynucleotide sequence of SEQ ID NO: 1-739, a mature protein coding portion of SEQ ID NO: 1-739, an active domain of SEQ ID NO: 1-739, complementary sequences thereof and a polynucleotide sequence hybridizing under stringent conditions to SEQ ID NO: 1-739, under conditions sufficient to express the polypeptide in said cell; and
b) isolating the polypeptide from the cell culture or cells of step (a).

20. An isolated polypeptide comprising an amino acid sequence selected from the group consisting of SEQ ID NO: 740-1478, the mature protein portion thereof, or the active domain thereof.

21. The polypeptide of claim 20 wherein the polypeptide is provided on a polypeptide array.

22. A collection of polynucleotides, wherein the collection comprises the sequence information of at least one of SEQ ID NO: 1-739.

23. The collection of claim 22, wherein the collection is provided on a nucleic acid array.

24. The collection of claim 23, wherein the array detects full-matches to any one of the polynucleotides in the collection.

25. The collection of claim 23, wherein the array detects mismatches to any one of the polynucleotides in the collection.

26. The collection of claim 22, wherein the collection is provided in a computer-readable format.

27. A method of treatment comprising administering to a mammalian subject in need thereof a therapeutic amount of a composition comprising a polypeptide of claim 10 or 20 and a pharmaceutically acceptable carrier.

28. A method of treatment comprising administering to a mammalian subject in need thereof a therapeutic amount of a composition comprising an antibody that specifically binds to a polypeptide of claim 10 or 20 and a pharmaceutically acceptable carrier.

The application's sequence listing, which the Patent Office published only in electronic form, follows.

SEQUENCE LISTING (1478 sequences)

SEQ ID NO: 1 - DNA, 556 bp, Homo sapiens
tttcgtgggccggttgctaagacttggcgaagcgctgcgcttgcgcccggatccctcaggcggctgcaggcttcagcctgcgctggttggtgaaacagagatgtcagaaaaggagaacaacttcccgccactgcccaagttcatccctgtgaagccctgcttctaccagaacttctccgacgagatcccagtggagcaccaggtcctggtgaagaggatctaccggctgtggatgttttactgcgccaccctcggcgtcaacctcattgcctgcctggcctggtggatcggcggaggctcggggaccaacttcggcctggccttcgtgtggctgctcctgttcacgccttgcggctacgtgtgctggttccggcctgtctacaaggccttccgagccgacagctcctttaatttcatggcgtttttcttcatctttcggagcccagtttgtcctgaccgtcatccaggcgattggcttctccggctggggcgcgtgcggctggctgtcggcaattggattcttccagtacagcccgggcgctgccgtggtcatgct

SEQ ID NO: 2 - DNA, 837 bp, Homo sapiens
gagatgagtcccagggagtacggagtcagctctgagccgaggtcaccgcagaagggagctcggtcttcggccaggaccggagcagttggaacaaagggaatgtggaaatgaaagagagagggagagagaggctggcagatgtaatgagacgcggtgaaggtgtacgcagactggcactcccactcctcccttctgctctcactgcagccctgggtaactcgcaggctaacacaaacagcttttctcccgcagcctgccctctgtcactgtcactttcatgaattcaaaggcaatttaccagtgatttctgggtgctggggctgatattttttgtgcatatttaagaatgtcttccaagcaagccacctctccatttgcctgtgcagctgatggagaggatgcaatgacccaggatttaacctcaagggaaaaggaagagggcagtgatcaacatgtggcctcccatctgcctctgcaccccataatgcacaacaaacctcactctgaggagctaccaacacttgtcagtaccattcaacaagatgctgactgggacagcgttctgtcatctcagcaaagaatggaatcagagaataataagttatgttccctatattccttccgaaatacctctacctcaccacataagcctgacgaagggagtcgggaccgtgagataatgaccagtgttacttttggaaccccagagcgccgcaaagggagtcttgccgatgtggtggacacactgaaacagaagaagcttgaggaaatgactcggactgaacaagaggattcctcctgcatggaaaaactactttcaaaagattggaaggaaac

SEQ ID NO: 3 - DNA, 1562 bp, Homo sapiens
cggaaccgtaggaggggtacttaaccggacggcctaccaggcctgtggccgtgcgcgggaagagcactgcagatctcaggatgatggggcgcagccctgggtttgccatgcagcacatcgtgggtgtgccccacgtactggttcggaggggcctccttggaagggacctcttcatgaccaggactctctgcagcccaggcccaagccagcccggagagaaaagacctgaggaggtggccctggggctgcaccaccgcctcccagcactgggaagagccctggggcacagcattcagcaacgagcgacctccacagccaagacttggtgggacagatatgaagagtttgttggactcaacgaggttcgagaggcccagggaaaggtgacagaggctgagaaagtgttcatggtggctcgagggcttgtccgagaggctcgggaggacttggaagttcaccaggccaagctgaaggaggtgagggaccgcttggaccgtgtctccagggaggacagtcagtacttggaactggctactctcgagcacaggatgctgcaggaggagaagaggcttcgcacagcctatctgcgtgcagaagactctgagcgagagaagttctccctcttctctgcagctgtgcgggaaagtcatgagaaggagcgcacaagggctgagaggaccaagaactggtccctcattggctcagtcctgggggccctgattggtgtggctggctccacctatgtgaaccgtgtgcgactacaggagctgaaggctttactcctggaggcgcagaaggggcctgtgagtctccaagaggccattcgagaacaggcgtctagctactcccgccagcagagggacctccacaatctcatggtggacttgaggggcctggtacatgctgctgggccagggcaggactctgggtcacaggcaggtagtcccccgaccagagacagagatgtagatgtcctttcagctgccttgaaagagcagcttagtcattccaggcaagtccattcatgtctagaaggcttacgagagcagcttgatggcctagaaaagacttgtagccaaatggctggggtggttcagcttgtaaagtctgcagcacacccaggcctggtggaaccagcagacggggctatgcccagcttcttgctggagcaggggagcatgatcttggcactgtcagacacggagcagagactagaagcccaagtcaacaggaacaccatctatagcaccctggtcacctgtgtgacatttgtggccacactgcctgtgctctacatgctattcaaagccagctaacccctggcccctcctccagagggtctgaggcaatagctgtgaatgtggatttaagtagagaatcgtagcaatgaagcgagcctttgggggcatgtacaacctcaatctgaaggagcagtatctgtgtggctcaccagcaggcatgcttcgctttgtagacaaggttcatttacattaattatcaaaactttgtgctaatgtccaattaaaatatcctgagttttattatttaaaacaaaaaaaaaa

SEQ ID NO: 4 - DNA, 745 bp, Homo sapiens
agggcttggggctgggtctccgtgacagaggcctggcttttctgtcagggcagggcctagcccctgcccccataaaagaggagacatagggggcttggtgagataccctgaaacctcccccctctgaccccgcagccaggccccaggctggccgggagtggcccctcacactggttctccccactttctctgcctgtggcatcgaaggccccgggcaccatggcccaggccctgggggaggacctggtgcagcctcccgagctgcaggatgactccagctccttggggtccgactcagagctcagcgggcctggcccatatcgccaggccgaccgctatggattcattgggggcagctcagcagagccagggccgggccacccacctgcagacctcatccgccaacgggagatgaagtgggtggagatgacctcgcactgggagaaaaccatgtcccggcggtacaagaaggtaaagatgcagtgccggaaaggcatcccgtctgccctgcgcgcccgatgctggcccctgttgtgtggggcccatgtgtgccagaagaacagccctggcacctatcaggagctggcagaggcccctggagacccacagtggatggagaccattggcagggacctgcaccgtcaattccctctgcacgagatgtttgtgtcgcctcaaggccacgggcagcaggggctcctgcaggtgctcaaggcctacaccctgtatcgaccggagcaaggct

SEQ ID NO: 5 - DNA, 536 bp, Homo sapiens
acggaagctcggttgatgtttctgcagaagttttcccccttggtcggtggcggagctgctgagcgcgatagtagcagctccggcggcagcaacattgactacgaggaatggcggcggctgccgcaggacctgcagcatcccagaggtttttccagagcttctcagatgctctaatcgaccaggacccccaggcggcgttagaggtgggagagccttttctgcttcctccactcccggctgacccgcctccttccagcaccgcctgattaggactcaggctctagtgatgctgcgtctcagccccagtattgagattctcggtctcctttctctctctcacggtagccgcgttacctcagactcctgtcttgccctttccacttccagactcttgcattcctgaagcttctgagaaaaacttcctctatttattgggagcatggttggcatctgcagttgggctgaaaggattttttttttttaatgactaaaaaagaaaaggggactctgggctcgatgaaaattaattttttctt

SEQ ID NO: 6 - DNA, 780 bp, Homo sapiens
attttatcgactattccgtcagacgccctcttgcctttagtgaactgcggggacctggcctttgccggtaggggccagcgcagaaaagcctgggagatgcgcgtccagggccgcgagtgcggggaagctgcgggaccgcagagtccgctcggcagccggtagtcagggcgccggggcgttaggcttcagatttacttcaatgttcctaatgggcttgcttcagaagtgctcactgttctcgccacctgaggaaccgcattttcatgtatttgtattgggacaagacgcggagtccggtgtgtaaagggcctgctttgagggaagaaaggccgcagcccaggctcaaactggaggattataaggatcgcctgaaaagtggagagcatcttaatccagaccagttggaagctgtagagaaatatgaagaagtgctacataatttggaatttgccaaggagcttcaaaaaaccttttctgggttgagcctagatctactaaaagcgcaaaagaaggcccagagaagggagcacatgctaaaacttgaggctgagaagaaaaagcttcgaactatacttcaagttcagtatgtattgcagaacttgacacaggagcacgtacaaaaagacttcaaagggggtttgaatggtgcagtgtatttgccttcaaaagaacttgactacctcattaagttttcaaaactgacctgccctgaaagaaatgaaagtctgagacaaacacttgaaggatctactgtctaaattgctgaactcaggctatttt

SEQ ID NO: 7 - DNA, 654 bp, Homo sapiens
  misc_feature (1)...(654): n = a,t,c or g
ctccccgtctcttccctggccttgccctctctctttctgccctgtagccgcgggcgtccaaatgaagctggaattcctccagcgcaaattctgggcggcaacgcggcagtgcagcactgtggatgggccgtgcacacagagctgcgaggacagtgatctggactgcttcgtcatcgacaacaacgggttcattctgatctccaagaggtcccgagagacgggaagatttctgggggaggtggatggtgctgtcctgacccagctgctcagcatgggggtgttcagccaagtgactatgtatgactatcaggccatgtgcaaaccctcgagtcaccaccacagtgcagcccagcccctggtcagcccaatttctgccttcttgacggcgaccaggtggctgctgcaggagctggtgctgttcctgctggagtggagtgtctggggctcctggtacgacagaggggccgaggccaaaagttgtcttccatcactcccacaaacacaagaagcaggacccgctgcagccctgcgacacggagtaccccgtgttcgtgtaccagcccggccatccgggaggccaacggggattcgtggagtgcgggcccttnccagaaagggtatttgttggtgcangcagattccnaacattaaact

SEQ ID NO: 8 - DNA, 469 bp, Homo sapiens
tgccgtgggcggctggcccagctggaggaagcggcggtggcggccacgatgagtgcgggcgacgcagtgtgcaccggctggctcgttaagtcgccccccgagaggaagctacagcgctacgcctggcgcaagcgctggtttgtcctccggcgaggccgcatgagcggcaaccccgatgtcttggagtactacaggaacaagcactccagcaagcccatccgggtgatagacctcagcgagtgtgcagtgtggaagcatgtgggccccagctttgttcggaaggaatttcagaataatttcgtgttcattgtcaagactacttcccgtacattctacctggtggccaaaactgagcaagaaatgcaggtgtgggtgcacagcatcagtcaggtctgcaaccttggccacctggaggatggtgcagcagattccatggagagcctctcttacacgcgctcctacctgcagc

SEQ ID NO: 9 - DNA, 409 bp, Homo sapiens
  misc_feature (1)...(409): n = a,t,c or g
agaaaccnaacagatctgtggggcaggaaaatgtttcttttccagctttcacagctctctgagaaggggcatggtgggaattttagccgatttaataaaagctgcagcatgagacctgtgaatcccaccctgctgcttcctggatcctgccacaccccatccagcagcaaccaagccagtctcgcccctgactgggacagagtggctgagaggggctctggagccagctgcctggatttgaatcccagctgtgccacttaccagctgtgtgactgtaggaagctactctttgtccgtgcgagactacgaccctcggcagggagataccgtgaaacattacaagatccggacccttgaacaaacggggcttctacatatcccccccgaagcaccttcagcactctgcagg

SEQ ID NO: 10 - DNA, 1145 bp, Homo sapiens
aaagattctgttttgaatatagccagaggaaaaaagtatggagaaaaaactaagagagtgtcttctcggaaaaaaccagccttgaagtgtcttctcagaaacaaccagcattgaaggctatctgtgacaaggaagattctgttccgaatacggccacggaaaaaaaggatgaacaaatatctgggacagtgtcttctcagaaacaaccagccttgaaggctacaagtgacaagaaagattctgtttcgaatatacccacagaaataaaggatggacaacaatctggaacagtgtcttctcagaaacaaccggcctggaaggctacaagtgtcaagaaagattctgtttcgaatatagccacagaaataaaggatggacaaataccgtgggacagtgtcttctcagagacaaccagccttgaaggcttacaggtgatgagaaagattctgtttcgaatatagccagagaaataaaggatggagaaaaatctgggacagtgtctcctcagaaacaatcggcccagaaggttatatttaaaaagaaagtttctcttttgaatattgccacaagaataacgggcggttggaaatctggaacagagtatcctgagaatctgcccaccttgaaggctacaattgaaaataaaaattctgttctgaatacagccaccaaaatgaaagatgtacaaacatccacaccagaacaagacttagaaatggcatcagagggagagcaaaagaggcttgaagaatatgaaaataaccagccacaggtgaaaaaccaaatacattctagggatgaccttgatgacataattcagtcatctcaaacagtctcagaggacggtgactcgctttgctgtaattgtaagaatgtcatattactcattgatcaacatgaaatgaagtgtaaagattgtgttcacctattgaaaattaaaaagacattttgtttatgtaaaagattaacagaacttaaagataatcactgtgagcaacttagagtaaaaattcgaaaactgaaaaataaggctagtgtactacaaaagagactatctgaaaaagaagaaataaaatcgcagttaaagcatgaaacacttgaattggaaaaagaactctgtagtttgagatttgccatacagcaag

SEQ ID NO: 11 - DNA, 890 bp, Homo sapiens
gtagtccgctgcggtaccgggccggacaatctgggtcgacgatttcgagctcgtcatgcgcaatgtggcgctgcggcgggcggcagggcctgtgtgtgctgaggcggctgagcggcggacatgcacaccacagagcgtggcgatggaacagtaaccgggcttgtgagagggctctgcagtataaactaggagacaagatccatggattcaccgtaaaccaggtgacatctgttcccgagctgttcctgactgcagtgaagctcacccatgatgacacaggagccaggtatttacacctggccagagaagacacgaataatctgttcagcgtgcagttccgtaccactcccatggacagtactggtgttcctcacattcttgagcataccgtcctttgtgggtctcagaaatatccgtgcagagaccctttcttcaaaatgttgaaccggtccctctccacgttcatgaacgccttcacagctagtgattatactctgtatccattttccacacaaaatcccaaggactttcagaatctcctctcggtgtatttggatgccacctttttcccatgtttacgcgagctggatttctggcaggaaggatggcggctggaacatgagaatccgagcgacccccagacgcccttggtctttaaaggagtcgtctttaatgagatgaagggagcgtttacagacaatgagaggatattctcccagcaccttcagaacagacttcttcctgaccacacgtactcagtggtctccgggggtgacccactgtgcatcccggagcttacatgggagcagcttaagcagtttcatgccactcactatcacccaagcaatgctaggttcttcacgtacggtaattttcccttagaccagcat

SEQ ID NO: 12 - DNA, 982 bp, Homo sapiens
  misc_feature (1)...(982): n = a,t,c or g
tttcgtcacacacgcacacgcaccctgccactgcagccgccatggatatcagctaacaacacacacccaggcgcgcgcgcgcgttcccactcgcaccacgcaggagtggcccccggcatccctaccctccttccccacccccaccacacccgctcaccagctcggctactgctcgctccggctgccgccgccgccgccgccgacgccaccaccactgcttcctctgctgcggggccacagccttgagtgtcattcaagggacagcacaacctcatccaagctctcctacctctgcccagccgtgcctctcatcctccccattcctcgtccacactccatccaaagaagagggaaagcaccgaatagaggggggcgaaggcaaagtctgctgttcttccccctgggcccccttgctcctccatcctcattctctcaccaccagcccccctaaccccaaggagcccaggaactgaggcgactcgccccactgccatgtccaaaagcttgaaaaagaaaagccactggactagcaaagtccatgagagtgtcattggcaggaacccggagggccagctgggctttgaactgaaggggggcgccgagaatggacagttcccctacctgggggaggtgaagcccggcaaggtggcctatgagagcggcagcaaattggtgtcggaggagctgctgctggaggtgaacgagacccccgtggcggggctcaccatcagggacgtgctggccgtgatcaaacactgcaaggaccccctccggctcaagtgtgtcaagcaaggtgagagcagcggcttgctcagtgttttgccgggcggtgggaccgctcggggcgcagggcaatgaaagggtggccgcgcatgttgaagggggtgtgttgcgcgatgatggggtgggggccagagagcacccgcagtgcaagtgagtttcgccggggattcgacgaaatcgtnncccgggaattccggac

SEQ ID NO: 13 - DNA, 440 bp, Homo sapiens
ccgtgccggaattcccgcgtcgacgatttcgtggctaaggcgccaggcacgggcaccaccagggcgcccaggagccgcccgccgccggcatggaccagctgtactgcccaccgagcgcgtgccagtcttttggtaagaactagtcacacagacctcaacctgatgcgtggagacaaggaaatgcttttcagtgtgtccagaaagagaaaatgcaggtgtcttctgcggaggtgcgcatcgggcccatgagactgacgcaggaccctattcaggttttgctgatctttgcaaaggaagatagtcagagcgatggcttctggtgggcctgcgacagagctggttatagatgcaatattgctcggactccagagtcagcccttgaatgctttcttgataagcatcatgaaattattgtaattgatcatagacaaactcagaac

SEQ ID NO: 14 - DNA, 581 bp, Homo sapiens
tttcgtttggccggctgcgggcacctcctggtctcgctgctggggctgctgctgctgctggcgcgctccggcacccgggcgctggtctgcctgccctgtgacgagtccaagtgcgaggagcccaggaactgcccggggagcatcgtgcagggcgtctgcggctgctgctacacgtgcgccagccagaggaacgagagctgcggcggcaccttcgggatttacggaacctgcgaccgggggctgcgttgtgtcatccgccccccgctcaatggcgactccctcaccgagtacgaagcgggcgtttgcgaagatgagaactggactgatgaccaactgcttggttttaaaccatgcaatgaaaaccttattgctggctgcaatataatcaatgggaaatgtgaatgtaacaccattcgaacctgcagcaatccctttgagtttccaagtcaggatatgtgcctttcagctttaaagagaattgaagaagagaagccagattgctccaaggcccgctgtgaagtccagttctctccacgttgtcctgaagattctgttctgatcgagggttatgctcctcctgg

SEQ ID NO: 15 - DNA, 693 bp, Homo sapiens
tttcgtatggcggccaatgtgggatcgatgtttcaatattggaagcgctttgatttacagcagctgcagagagaactcgatgccaccgcaacggtattggcgaaccggcaggatgaaagtgagcagtccagaaagcggcttatcgaacagagccgggagttcaagaagaacactccagaggtgaggcgcgtgaccatcgtgttcgctttgaagggatcttagaatgctggtgcatgttcaggcgacgctccgtgagcgtttcattttcatcagatgaacgcacggccggcaaacaacccgtttctttccccagatgtcttcagccccatttccagcagaacgcatgccatcctgcaggctgtggggatgtggaaattgataggttgtctggaaatatgaaagtcagagccaattccaggtgcagatactggacaagcttggtctgtaagaacacgtgggcaggtgtgtgggtgtctcaaaccctcgagctcatcccagaccctgtcccatgtcagttagcaagccaccaaagtccataagggatcctgtggggtggaaggtccgcggggcctgcttccctgttgctggtgcaggcggagtgtctgaaggctgcacgcatctgggcatagcagtgcgcctaacgcttcttgtaaaacagacatttcgcctgctaagccttttaaatgcctctct

SEQ ID NO: 16 - DNA, 562 bp, Homo sapiens
tttcgtggaaagagagaaaccaccgctgcgggtgggtagagaagcacttggcgcctcggggaggggaccgcgcccgcctcatttgcgccttgcagcactgctggaccaggttacaagatgttcacctaagattgagacctagtgactacatttcctacgggaacaaataaatggtttttcatctcccggagatacattacaaacaaatatggtgctaaaagaactccttacctttctctgactacaatttatttggacatacttttgtattgaagagaggtatacatactgaagctacttgctgtactataggagactctgtcctgtaggatcatggaccatcctagtagggaaaaggatgaaagacaacggacaactaaacccatggcacaaaggagtgcacactgctctcgaccatctggctcctcatcgtcctctggggttcttatggtgggacccaacttcagggttggcaagaagataggatgtgggaacttcggagagctcagattaggtgaaggtctcccacaggtgtattactttggaccatgtgggaaatata

SEQ ID NO: 17 - DNA, 899 bp, Homo sapiens
tttcgtgcgtccccggcccaaccatggcgtcctccgcggccggctgcgtggtgatcgttggcaggaagtctgaaacagcagttggagtgtagtggttaagaggaaggactcaggagtcagattgcttggcttcatctcatagatccataacttatcacccttgtggacttaattcctccatgcctcagtttatcacttatgtaggcttaattcctccatgcctcagtttccctacatataaaatggaaatactaataacacttatcttgtagggttgttgtaaagattaacatagtggagtcattgggcgaagctgggccatgctgtttgccagtggaggcttccaggtgaaactctatgacattgagcaacagcagataaggaatgccctggaaaacatcaggtgggccagccggcgctctccagaaggaatggaagtgggtctgtttctctcagttggtcttgtttgtcatatcctcaaggctatgaggatctgtgatgtcacattttcgtctgatggctactgcagtgcctctgagttggtaaaggccaggcctacagtggctggaatgtgaattcacactggggaagggctcccatgggggaggaaacgacccttcttgctaagaggatctgcatcaagcgtgagtgactttgcaggcttctccagctgtttgccccggggctggagggctggggtttcctgcttccatctaggcaggaggaactcgcttccagcatgtgacagccatagctgcaggggcattacagtttaagaacagaggtcctgcagcttgttttgacctgttgatctagtaatggtaggacccaaatgaaaacatcttgaattttagttagaggtttagcactcatgtgagaggacagaactggagctgttt

SEQ ID NO: 18 - DNA, 519 bp, Homo sapiens
ggaattcccgggtcgacgatttcgtctccgcccgcccgaagccgcgcccactgcccagagccagagggatggtggtagtcacggggcgggagccagacagccgtcgtcaggacggtgccatgtccagctctgacgccgaagacgactttctggagccggccacgccgacggccacgcaggcggggcacgcgctgcccctgctgccacaggagtttcctgaggttgttccccttaacatcggaggggctcacttcactacacgcctgtccacactgcggtgctacgaagacaccatgttggcagccatgttcagtgggcggcactacatccccacggactccgagggccggtacttcatcgaccgagatggcacacactttggagatgtgctgaatttcctgcgctcaggggacctcccacccagggagcgtgttcgagctgtgtacaaagaggcccagtactatgccatcgggcccctcctggagcagctggagaacatgccgccactgaaaggcgaga

SEQ ID NO: 19 - DNA, 460 bp, Homo sapiens
tttcgtgcaggggccaggcctctctaggctctccggctgagccgggttggggcccgggttgggccgcccggggactctggagcattgggatttgtagcgcgccctctgggtaggcggctgtagcggagaggcgtgcgggatcgggatgtcggggctgctcacggacccggagcagagagcgcaggagccgcggtaccccggcttcgtgctggggctggatgtgggcagttctgtgatccgctgccacgtctatgaccgggcggcgcgggtctgcggctccagcgtgcagaaggtagaaaatctttatcctcaaattggctgggtagaaattgatcctgatgttctttggattcaatttgttgccgtaataaaagaagcagtcaaagctgcaggaatacagatgaatcaaattgttggtcttggcatttcaacacagagagcaacttttattacgtggaac

SEQ ID NO: 20 - DNA, 731 bp, Homo sapiens
gagatcaaggagggctcagaagaggcgatgtctgatctgtcctccaggcagcaaaggaaagggaggtgtgttcctggcagaaggcacagcttgtactgaggcctggcagcagaacagagtatgcaatttgtgaagctgtggtgtggctgcagtggagagttcccaacaaggctacgcagaagaacccccttgactgaagcaatggaggggggtccagctgtctgctgccaggatcctcgggcagagctggtagaacgggtggcagccatcgatgtgactcacttggaggaggcagatggtggcccagagcctactagaaacggtgtggaccccccaccacgggccagagctgcctctgtgatccctggcagtacttcaagactgctcccagcccggcctagcctctcagccaggaagctttccctacaggagcggccagcaggaagctatctggaggcgcaggctgggccttatgccacggggcctgccagccacatctccccccgggcctggcggaggcccaccatcgagtcccaccacgtggccatctcagatgcagaggactgcgtgcagctgaaccagtacaagctgcagagtgagattggcaagggtgcctacggtgtggtgaggctggcctacaacgaaagtgaagacagacactatgcaatgaaagtcctttccaaaaagaagttactgaagcagtatggctttccacgtcgccctcccccgaa

SEQ ID NO: 21 - DNA, 519 bp, Homo sapiens
tttcgtttatgggaagccagtaacactgtggcctactatctcttccgtggtgccatctacatttttgggactcgggaattatgaggtagaggtggaggcggagccggatgtcagaggtcctgaaatagtcaccatgggggaaaatgatccgcctgctgttgaagcccccttctcattccgatcgctttttggccttgatgatttgaaaataagtcctgttgcaccagatgcagatgctgttgctgcacagatcctgtcactgctgccattgaagttttttccaatcatcgtcattgggatcattgcattgatattagcactggccattggtctgggcatccacttcgactgctcagggaagtacagatgtcgctcatcctttaagtgtatcgagctgatagctcgatgtgacggagtctcggattgcaaagacggggaggacgagtaccgctgtgtccgggtgggtggtcagaatgccgcgctccaggtgttcacagctgcttcgcggaagaccatgtg

SEQ ID NO: 22 - DNA, 544 bp, Homo sapiens
tttcgtgctggaggttcgctagccgaagcggctgcatctggcgccgcgtctgccccgcgtgctcggagcggattctgcccgccgtccccggagccctcggcgccccgctgagcccgcgatcacttcctccctgtgaccaaccggcgctgcaggttagagcctggcaatgccgtttgggtgtgtgactctgggcgacaagaagaactataaccagccatcggaggtgactgacagatatgatttgggacaggtcatcaagactgaggagttttgtgaaatcttccgggccaaggacaagacgacaggcaagctgcacacctgcaagaagttccagaagcgggacggccgcaaggtgcggaaagctgccaagaacgagataggcatcctcaagatggtgaagcatcccaacatcctacagctggtggatgtgtttgtgacccgcaaggagtactttatcttcctggagctgtgagtgtgggtctggggacccaaaattccccagcgcccagggctttcacctgtcccaccctctgcagctaaggag

SEQ ID NO: 23 - DNA, 749 bp, Homo sapiens
caacgtcgacgatttcgtgcggggctgtggggagggcacggactgacagacggactccggcggaatggggggtgtggctgctccgccagggtccccagggtgggagagcggctccgcggccaccgatgcccggaccccctctgtcttctgctagacatgctcttcctctcgtttcatgcaggctcttgggaaagctggtgctgctgctgcctgattcccgccgacagaccttgggaccggggccaacactggcagctggagatggcggacacgagatccgtgcacgagactaggtttgaggcggccgtgaaggtgatccagagtttgccgaagaatggttcattccagccaacaaatgaaatgatgcttaaattttatagcttctataagcaggcaactgaaggaccctgtaaactttcaaggcctggattttgggatcctattggaagatataaatgggatgcttggagttcactgggtgatatgaccaaagaggaagccatgattgcatatgttgaagaaatgaaaaagattattgaaactatgccaatgactgagaaagttgaagaattgctgcgtgtcataggtccattttatgaaattgtcgaggacaaaaagagtggcaggagttctgatataacctcagatcttggtaatgttctcacttctactccaaacgccaaaaccgttaatggtaaagctgaaagcagtgacagtggagccgagtctgaggaagaagaggcgtgtgt

SEQ ID NO: 24 - DNA, 556 bp, Homo sapiens
tttcgtgctttaaggggcggacgggcgggaggtcggggtcctccggggattcgagccggtgggctcgttgtgggcgccatttctcggcgtctaccgaggagccgcccctttctcagccttgctcggctcttccccgctctggtcgccggggctgcgccgtccccagctcagtgacaaaaatgctgagtttcttccgtagaacactagggcgtcggtctatgcgtaaacatgcagagaaggaacgactccgagaagcacaacgcgccgccacacatattcctgcagctggagattctaagtccatcatcacgtgtcgggtgtcccttctggatggtactgatgttagtgtggacttgccaaaaaaagccaaaggacaagagttgtttgatcagattatgtaccacctggacctgattgaaagcgactattttggtctgagatttatggattcagcacaagtagcacattggttggatggtacaaaaagcatcaaaaagcaagtaaaaattggttcaccctattgtctgcatcttcgagttaagttttattcctcaga

SEQ ID NO: 25 - DNA, 422 bp, Homo sapiens
gtcggtgagaatccagggagaggagcggaaacagaagaggggcagaagaccggggcacttgtgggttgcagagcccctcagccatgttgggagccaagccacactggctaccaggtcccctacacagtcccgggctgcccttggttctggtgcttctggccctgggggccgggtgggcccaggaggggtcagagcccgtcctgctggagggggagtgcctggtggtctgtgagcctggccgagctgctgcaggggggcccgggggagcagccctgggagaggcaccccctgggcgagtggcatttgctgcggtccgaagccaccaccatgagccagcaggggaaaccggcaatggcaccagtggggccatctacttcgaccaggtcctggtgaacgagggcggtggctttgaccgggcctct

SEQ ID NO: 26 - DNA, 506 bp, Homo sapiens
agaagatgtgaagtcgtattatacagtacatctaccacaattagaaaatatcaatagtggtgaaaccagaacaatatctcactttcattatactacttggccagattttggagtccctcaatcaccagcttcatttctcaatttcttgtttaaagtgagagaatctggctccttgaaccctgaccatggacctgtggtgatccaccgtagtgcaggcactggacgctccagcaccttctctgtggtacacacttgtcttgttttgatggaaaaaggagatgatattaacattaaacaagtgttactgaacataagaaaattccaaatgggtcttatctcagaccccagatcaactgagattctcatacatggctataacagaaggagcaaaatgtgtaaagggagattctagtatacagaaacgatggaaagaactttctaaggaagactccctcctgcttttgatcattcaccaaacaaaataatgactgaaaaatacaatagga

SEQ ID NO: 27 - DNA, 850 bp, Homo sapiens
caggcctttgtgtaaggccagaggaggatcacgggtgccataaaccttcacggggccaagggctggtgtcccggggctggtgacttaacaggcagagatgtggagaccaggtgcttgtgcccgggacgggcctggctgccatcctgaggacactgcccatgttccatgacgaggagcacgcccgagcccgcggcctctctgaggacaccctggtgctacccccggccagccgcaaccagaggattctctacaccgtgctggagtgccagcccctcttcgactccagtgacatgaccatcgctgagtgggtttgccttgcccagaccatcaagaggcactacgagcagtaccacggctttgtggtcatccacggcaccgacaccatggcctttgctgcctcgatgctgtccttcatgctggagaacctgcagaagactgtcatcctcactggggcccaggtgcccatccatgccctgtggagcgacggccgtgagaacctgctgggggcactgctcatggctggccagtatgtgatcccagaggtctgccttttcttccagaatcagctgtttcggggcaaccgggcaaccaaggtagacgctcggaggttcgcagctttctgctccccgaacctgctgcctctggccacagtgggtgctgacatcacaatcaacagggagctggtgcggaaggtggacgggaaggctgggctggtggtgcacagcagcatggagcaggacgtgggcctgctgcgcctctaccctgggatccctgccgccctggttcgggccttcttgcagcctcccctgaagggcgtggtcatggagaccttcggttcagggaacggacc

SEQ ID NO: 28 - DNA, 990 bp, Homo sapiens
ttttttttttttacttgtaatacgtattttaatttttgtttcatatgagtttaagtgttgtctaggtgacatcaaaatctaaggcaaacagacttgaccatcttcagacccactgcattctcaagctgaagtggtctgctcatagtttgtgtgccaggttgctcatcagtattgatactgtcccagaacaggttgtaggtataattcagagactgtcctttgcaaaggaaatgaccagcatttcaactgtatgtcttcctggaagggtagattctgctatatcttctttgtctgcatcaaaagactcaagaggaatgtggacacatttcatatcccatttgtagagtaaagcttcaagtgaccagtcagcactcctaacttgataagtagaccacaattggaccttgggattcttgtgcatcaaaaaatatattgtagccaaaatgtcttcaaaatcttctggttcaaagaacacatcagatgcaaggataatatcttgtggtggtagagccagaagatcccaagatatatgaccccatgttagtcctaccacctgcagatgtggcaggttattcatttggcagctttgccgacagacttccagacagtgaggcagttctgagctgtctgacagtattacttctgcaccacatttggcagccaaaattcctggaaggctcactccagctccaatctgcgggacgtggacctccaggacagccccgtcggcccccggacccggctcctccgagaatcgaaagcgctgggcccggaccccctgtcctcggaaatcgtgctcgcccagtagggcgtcgttgggccccgggcgggcgggggaccgcggaaggctccgggctgccagactgcgcgagcgggaagccgcgggccacgtggccgtagcacctgacggcaagaaggggaaagcccagatctggtgataaccctgccgcgctagcgagcgaagaaagcccggagcaaggcgaaagagac

SEQ ID NO: 29 - DNA, 622 bp, Homo sapiens
ttttttttttttgtgttgataaagctttatttataaacacactcacagggccagatttgggccacgggccatagttgccagcccggctttaactgctggtcctcacgttagtctcactgcctcctgcagggtgggcatgtgggtgtcgtgttcacccagccccttcctccaccccacaaacaccctggtggctgtcctggagcgcgacacactgggcatccgtgaggtgcggctgttcaatgccgttgtccgctggtccgaggccgagtgtcagcggcagcagctgcaggtgacgccagagaacaggcggaaggttctgggcaaggccctgggcctcattcgcttcccgctcatgaccatcgaggagttcgctgcaggtaacagagctcgggctcaggggctggtttgggaggggagtggcacacaggtgggcatctgggtaccgaggatagtgcccccgagttcactgcggaaagcctggcagatgcctggcatatacagataggaagaaacctggcttgtgaggacgcgtccacagggccatctgttagccccggcccggctctgtccccaccgtgcacactgccagaccccgcctctcgtgtctgtccagctgttttgg

SEQ ID NO: 30 - DNA, 181 bp, Homo sapiens
  misc_feature (1)...(181): n = a,t,c or g
ttttttttttttgagacggagntgngctctgtnacccaggntagagtgcaatggcacgntctcggctcactgcaagctctgcgtcctgggttgacgccattctcctgcctcagcctcccgagtagctgggactacaggagcttcgccaccaattccagcctggggtggacagagtgataag

SEQ ID NO: 31 - DNA, 1956 bp, Homo sapiens
aaactccgaacacatccaaacatcagaaggaacaaactccagacacaccgcctttaagaactgttacgctcaccgcgagggtccacggcttcattctccaagtcagaccaagaacccaccaattccggacacaaaaggcgtagcgtgcctcctgtgattgttgaagagctgtggtgtgctgctgagtggcgtgtgtattccatgtgaggggaagggtccaacagtcctggtcattcagactgcagttccccaggacagacccacgaagtcaagcatgcggagtgcagccaagccctggaacccagccatcagagcagggggccacggcccagaccgggtgcggcctctgcctgcagcctcttccggcatgaagagttctaagtcttcaacttccttggcttttgagtcccgactcagcaggctcaagagggccagcagtgaggacacgctcaacaagccaggaagtaccgctgcatcgggggtggttcgcctgaagaagaccgccactgccggagccatctcggagctcacggagagccgcctgaggagcggcacaggggcctttacaacaactaaacggacaggcattccagccccacgggaattttcagtaactgtctcaagagagaggtctgtgccacgtggtccctccaaccccaggaaatcagtgtccagtccaacttcctccaacactcccactcctacgaaacacctgaggaccccttccacaaagcccaagcaagagaatgaaggtggagaaaaggctgcgcttgagtcccaagttcgggaacttttggcagaagccaaagcaaaagatagtgaaattaacaggcttcgaagtgaactaaagaaatacaaagagaaaaggactctgaacgctgaggggactgatgctttgggcccaaatgtcgatggaacatcagtctccccaggtgacacggaacctatgataagagctcttgaggagaagaacaagaactttcagaaagagctttccgatctagaggaagaaaaccgggtcctgaaggagaaactgatctatcttgagcactccccaaattcagaaggggcagcaagtcacactggcgacagcagctgcccaacatccataactcaagagtcaagcttcggaagcccaactggaaatcagttgtccagtgacattgatgagtataaaaaaaacatacatggaaatgcattacggacatcaggctcctcaagtagcgatgttaccaaagcttctttgtcgccagatgcttccgactttgagcacattacagcagagacaccctcaaggcccctgtcctccaccagtaacccctttaagagttcaaagtgttctactgctgggagttccccaaacagcgtaagtgaattgtccctggcttccctcacagagaagatacaaaagatggaagaaaaccaccatagcactgcagaagaactacaggctactctacaagaattatcagaccagcaacaaatggtacaggaattgacagctgaaaatgagaagctggtggatgaaaagacgattttagagacatcctttcatcagcatcgagagagggcagagcagctaagtcaagaaaatgagaagctgatgaatcttttacaagagcgagtaaagaatgaagagcccaccactcaggaaggaaaaattattgaactggagcagaagtgcacaggtattcttgaacagggccgctttgaaagagagaagctactcaacattcagcagcagttgacctgtagcttgcggaaggttgaggaagaaaaccaaggagctttagaaatgattaaacgtctgaaggaagaaaatgaaaaactgaatgagtttctagaactggaacggcataataataacatgatggccaaaactttggaagagtgtagagttaccttggaagggctaaaaatggagaatggatctttgaagtctcatttgcagggtga

SEQ ID NO: 32 - DNA, 513 bp, Homo sapiens
ctcagcaccacaaggaagtgcgggacccacacgcgctcggaaagttcagcatgcatgaagtttggggagagctcggcgattaacacagcgacccgggccagcgcagggcgagcgcaggcggcgagagcgcagggcggcgcggcgtcggtcccgggagcagaacccggctttttcttggagcgacgctgtctctagtcgctgatcccaaatgcaccggctcatctttgtctacactctaatctgcgcaaacttttgcagctgtcgggacacttctgcaaccccgcagagcgcatccatcaaagctttgcgcaacgccaacctcaggcgagatgagagcaatcacctcacagacttgtaccgaagagatgagaccatccaggtgaaaggaaacggctacgtgcagagtcctagattcccgaacagctaccccaggaacctgctcctgacatggcggcttcactctcaggagaatacacggatacagctagtgtttgacaatcagtttggattaac

SEQ ID NO: 33 - DNA, 712 bp, Homo sapiens
acagacatggttccagctctgtagaactgagagaaagaataaacaagtcacacattagcccttcaaaaagatgaccgacctcttgagaagtgttgtcaccgtaattgatgttttctacaaatacaccaagcaagatggggagtgtggcacactgagcaagggtgaactaaaggaacttctggagaaagagcttcatccagttctgaagaacccagatgatccagacacagtggatgtcatcatgcatatgctggatcgagatcatgacagaagattggactttactgagtttcttttgatgatattcaagctgactatggcctgcaacaaggtcctcagcaaagaatactgcaaagcttcagggtcaaagaagcataggcgtggtcaccgacaccaagaagaagaaagtgaaacagaagaggatgaagaggatacaccaggacataaatcaggttacagacattcaagttggagtgagggagaggagcatggatatagttctgggcactcaaggggaactgtgaaatgtagacatgggtccaactccaggaggctaggaagacaaggtaatttatccagctctgggaaccaagagggatctcagaaaagataccacaggtccagctgtggtcattcatggagtggtggcaaagacagacatggttccagctctgtagaactgagagaaagaataaacaagtcacacattaaa

SEQ ID NO: 34 - DNA, 600 bp, Homo sapiens
cagatttctcaggtgagctcagatagcaatccactgtgttcctttatctccagcagatatatatcaatatcttgaagcagttttctactcaatttagaagaacttctggttaaatttacaattcttttttctctcccatgcttgttgtttctcattcaaacaagactggcatagctactttatgagggtaggtctccctgaattttaagttccaaagatctctggacctgatcatattgactttattccgtgggatcaactcttcatggccagttcttcctctgtcactgagttcttagtgctgggcttctctagccttggggaattgcagcttgtcctctttgcagtctttctctgcctctatttgattatcttgagtggaaacatcatcatcatctcagtcattcatttggatcacagcctccacacacccatgtacttctttctaggtattctttctatctctgaaatcttctacacaactgttattctgcccaagatgcttatcaacttattctctgtattcaggacactctcctttgtgagttgtgccacccaaatgttctacgaaatcgtcggcccgggaactcaggaacggtc

SEQ ID NO: 35 - DNA, 985 bp, Homo sapiens
tttcgtcctactgtccctgtcctgcccttgcagacatgtgtcctgcccttgcagacagccgcaggcaggcagggaccaccatgagcaaccccgtctctcctcctgaggggcagcacagagcctggaggaggcctgagtggggttgaggcctggggcgagctggggtggaggggcactggctgccgggctccagggatcttctccccttcctgccccggagggtgctggcacaggggtggggctcactcccactccgtagacacaatgatcagaggtcctgggtgtctggggaagctgggctgtgcgtgtatgcgtctaccatgtgggggtgcctgtgagtgtgctggggcgtctgcagtgaaggcctcctgagaccactccacggaaacaccgggaatccctgcagctgagcctgtctctcacgggaccgggaagctggagagagccccaaccctgcccgctggggccgagctccctgctcctgcagcagtcccgtgccccacactctgagtctgccctatccacagctgctgggcctctctgtggccaccatggtgactcttacctacttcggggcccactttgctgtcatccgccgagcgtccctggagaagaacccgtaccaggctgtgcaccaatgggggactcagcagcgacttatccaacatccagagagcgggagcgagggccagagcctgctggggccactcagggccttctctgcggggttgagcctggtgggcctcctgactctgggagccgtgctgagcgctgcagccaccgtgagggaggcccagggcctcatggcagggggcttcctgtgcttctccctggcgttctgcgcacaggtgcaggtggtgttctggagactccacagccccacccaggtggaggacgccatgctggacacctacgacctggtatatgagcaggcgatgaaaggtacgtcccacgtccggcggcaggagctggcggccatccagga

SEQ ID NO: 36 - DNA, 464 bp, Homo sapiens
ccgtatcggcgtttatatactgaagataagcctgatgagtaacaggcttgctcgtcatactttcgtgagtattggcgttgtacaggcaagtcgtaaaataacagcctggctattcagagtatgataaaaacagggggcaagggatgttgcttaatatgatgtgtggtcgtcagctgtcggcaatcagtttgtgcctggccgtaacattcgctccactgttcaatgcgcaggccgatgagcctgaagtaatccctggcgacagcccggtggctgtcagtgaacagggcgaggcactgccgcaggcgcaagccacggcaataatggcggggatccagccattgcctgaaggtgcggcagaaaaagcccgcacgcaaatcgaatctcaattacccgcaggttacaagccggtttatcttaaccagcttcaactgttgtatgccgcacgcggtatttcctgcagcgtg

SEQ ID NO: 37 - DNA, 429 bp, Homo sapiens
tcgcacaagagctgctgatgtctatgtcttttcgctcacgggaaaatctcgaaacgtgagttcctcaaccgtgcggcgaagtgcggtaggcgggatgtcggcattagcgttgtttgatttgctcaagccaaattatgcgctggcgactcaggtagagtttaccgacccggaaattgttgctgagtacatcacgtatccttcgccaaatggtcacggcgaggtgcggggttatctggtgaagcccgcaaagatgagcggcaaaacgccagccgtagtggtggtgcatgagaatcgtggactgaatccgtatatcgaagatgtggcacggcgagtggcgaaggcggggtatatcgccctggcacctgacggcttaagttccgttggaggttatccgggaaatgatataaaggtggtatccgcagcggcccc

SEQ ID NO: 38 - DNA, 556 bp, Homo sapiens
gagaataacctagacgttattgacttgatgccccgcgtcggtaaggcgctggataccacgcagcgcggcgtgctgtttaatgcagtaacccgatggggcaattaagtgaaacagagacatggcaattccttgctgacaacagaaacgaaatgtatatcatgccgcttaggtgtgccgttgtcacctcaacggcgattccaggctataaggatagaagaagtgaaattgagatggtttgcctttttgattgtgttattagcgggttgttcatcaaagcatgactatacgaacccgccgtggaacgcgaaagttccggtgcaacgtgcgatgcagtggatgccaataagccagaaagccggtgcagcctggggcgtcgatccacaattgatcacggcgattatcgctatcgaatcgggtggtaatccgaacgcggtgagtaaatcgaatgccattggtttgatgcagttaaaagcttcaacctccggacgtgatgtttatcgccgtatgggctggagtggtgagccgacgaccagcgagctgaagaattcctcaagac

SEQ ID NO: 39 - DNA, 890 bp, Homo sapiens
accacgctgcaggaattcggcacgaggccaaaccaaagagaagtttttatgctgccagggatttgtacaagtaccgacaccagtacccaaacttcaaagatatccgatatcaaaatgacttgagcaatcttcgtttttataagaataaaattccattcaagccagatggtgtttacattgaagaagttctaagtaaatggaaaggagattatgaaaaactggagcacaaccacacttacattcaatggcttttccccctgagagaacaaggcttgaacttctatgccaaagaactaactacatatgaaattgaggaattcaaaaaaacaaaagaagcaattagaagattcctcctggcttataaaatgatgctagaattttttggaataaaactgactgataaaactggaaatgttgctcgggctgttaactggcaggaaagatttcagcatctgaatgagtcccagcacaactatttaagaatcactcgtattcttaaaagccttggtgagcttggatatgaaagttttaaatctcctcttgtaaaatttattcttcatgaagctcttgtggagaatactattcccaatattaagcagagtgctctagagtattttgtttatacaattagagacagaagagaaaggagaaagctcctgcggttcgcccagaaacactacacgccttcagagaactttatctggggaccgcctcgaaaagaacagtcggagggaagcaaagcccagaaaatgtcttcccctctcgcctccagtcataacagtcaaacttctatgcacaaaaaagccaaggactccaaaaattcctcctcagctgttcatttaaatagcaaaacagctgaagacaaaaaagtggcaccaaaagagcctgtg

SEQ ID NO: 40 - DNA, 393 bp, Homo sapiens
accggctgccatcttagtctagggactgaggagtcgccgccgccccgagtcccggtaccatgcatttcacggtggccttgtggagacaacgccttaacccaaggaagtgactcaaactgtgagaacttcaggttttccaacctattggtggtatgtctgacagtggatcacaacttggttcaatgggtagcctcaccatgaaatcacagcttcagatcactgtcatctcagcaaaacttaaggaaaataagaagaattggtttggaccaagtccttacgtagaggtcacagtagatggacagtcaaagaagacagaaaaatgcaacaacacaaacagtcccaagtggaagcaaccccttacagttatcgttacccctgtgagtaaattacatt

SEQ ID NO: 41 - DNA, 437 bp, Homo sapiens
gcattccttgaaagaaatgttacagccagatcacagcgcagaacgataaaatggcacaatccaacaacaattttacattttcgcgaccgctttggctgctttcaggtccgtttcaatgatatactgccagtcgttaattcaaaaatagttgataattacaacaatctattgaattgaaacgctttccttcgtaattcgcaactggaacacgcacgctatgagtaaacccattgtgatggaacgcggtgttaaataccgcgatgccgataagatggcccttatcccggttaaaaacgtggcaacagagcgcgaagccctgctgcgcaagccggaatggatgaaaatcaagcttccagcggactctacacgtatccagggcatcaaagccgcaatgcgcaaaaatggcctgcattctgtctgcgaggaagcctcctgcc

SEQ ID NO: 42 - DNA, 392 bp, Homo sapiens
tcccctgcgtcaattttcctgacagagtacgcgtaataaccaaatcgcgcaacggaaggcgacctgggtcatgctgaagcgagccaccaggagacacaaagcgaaagctatgctaaaacagtcaggatgctacagtaatacattgatgtactgcatgtatgcaaaggacgtcacattaccgtgcagtacagttgatagccccttcccaggtagcgggaagcatatttcggcaatccagagacagcggcgttatctggctctggagaaagcttataacagaggataaccgcgcatggtgcttggcaaaccgcaaacagacccgactctcgaatggttcttgtctcattgccacattcataagtacccatccaagagcacgcttattccccagg

SEQ ID NO: 43 - DNA, 555 bp, Homo sapiens
tggctcgcgcgtcataatgggagttttgatactgtggattgccggttcgatgtggtagccttcaccgggaatgaggttgagtggattaaggatgcctttaatggccactcataattaaggtttaaggattagcgtgcaagaaagaattaaagcttgcttcactgaaagcattcaaactcaaattgcggcggcagaggcgcttccggatgccatctcccgtgcagccatgacgctggttcagtctctgctcaatggcaacaaaatcctctgttgtggtaatggaacttccgctgccaatgcacagcattttgctgccagcatgatcaaccgtttcgaaacggagcggcccagcttacctgccattgcactaaatactgataatgttgtcttaacggcgattgccaacgatcgcttacatgatgaagtgtatgcaaaacaggtgcgggcgctgggtcatgcgggagatgtattgttagccatttccacccgtggcaacagccgcgatattgttaaagcagttgaagccgccgttacgcgtgatacgaccattgtggc

SEQ ID NO: 44 - DNA, 553 bp, Homo sapiens
ctatgacctgattacaattcaggtccgacccgagatctccaaaatgccaggacgctgtggctacacaagctaaccatgctgattaatgaaaagaaactcaacatgatgaatgccgagcaccgcaagctgcttgagcaggagatggtcaacttcctgttcgagggtaaagaggtgcatatcgagggctatacgccggaagataaaaaataaaaacagtgccggagcacgcctccggcaacttgcataaaaacaaacacaacacgcacccggaatgatgaaaaaatatctcgcgctggctttgattgcgccgttgctcatctcctgttcgacgaccaaaaaaggcgatacctataacgaagcctgggtcaaagataccaacggttttgatattctgatggggcaatttgcccacaatattgagaacatctggggcttcaaagaggtggtgatcgctggtcctaaggactacgtgaaatacaccgatcaatatcagacccgcagccacatcaacttcgatgacggtacgattactatcgaacccatccccgggaca

SEQ ID NO: 45 - DNA, 310 bp, Homo sapiens
tctcgttacgacttcgagcgttggacccggggatctctctactatcgctgcaagcgagccagaaaaaactggatgaactgatcgaacagcactaaacccaggacaggaatccgcaatgaacaggcttttttcaggtcgttccgatatgccctttgcgctgctgcttctcgcgcccagcttattactgctgggcggtctggtggcgtggccgatggtgtcgaatatcgaaatcagttttttacgtctgccgctcaatcccaacatcgagtcaacgtttgttggggtgagcaactatgtgcgtatcctctcc

SEQ ID NO: 46 - DNA, 627 bp, Homo sapiens
ctcgctgactcgcttcgcttccccgacgcgctgggttcccggagcgcagagcccagcgttagcgggtgggctccccgaggccccctgccctcgccgggctgctccagggtgtcgctcctctggctgctcccgaaggggcttctggccctgaggacggtggtgccaagcgaacttcatttttaaaaagaactggtggatgagaagagcgagcgagggcgagctatggaccctgtgagtcagctggcctctgcgggcaccttccgggtgctgaaggagccccttgccttcctgcgagccctggaattgctttttgcaatctttgcatttgcaacatgcggtggctattctggaggcctgcggctgagtgtggactgcgtcaacaagacagaaagtaacctcagcatcgacatagcgtttgcctacccattcaggttgcaccaggtgacgtttgaggtgcccacctgcgagggaaaggaacggcagaagctggcattgattggtgactcctcgtcttcagcagagttcttcgtcactgttgctgtcttcgccttcctctactctttggctgccactggtcgttacattttctttcacaacaaaaaccgggaaaacaaccggggcccactg

SEQ ID NO: 47 - DNA, 998 bp, Homo sapiens
acctgggcaccgtgtcctatggcgccgacacgatggatgagatccagagccatgtcagggactcctactcacagatgcagtctcaagctggtggaaacaatactggttcaactccactaagaaaagcccaatcttcagctcccaaagttaggaaaagtgtcagtagtcgaatccatgaagccgtgaaagccatcgtgctgtgtcacaacgtgacccccgtgtatgagtctcgggccggcgttactgaggagactgagttcgcagaggctgaccaagacttcagtgatgagaatcgcacctaccaggcttccagcccggatgaggtcgctctggtgcagtggacagagagtgtgggcctcacgctggtcagcagggacctcacctccatgcagctgaagacccccagtggccaggtcctcagcttctgcattctgcagctgtttcccttcacctccgagagcaagcggatgggcgtcatcgtcagggatgaatccacggcagaaatcacattctacatgaagggcgctgacgtggccatgtctcctatcgtgcagtataatgactggctggaagaggagtgcggaaacatggctcgcgaaggactgcggaccctcgtggttgcaaagaaggcgttgacagaggagcagtaccaggactttgaggtgagccgactcccaggcatcccatcctcctacgacggtgccttccttacgctgaaattagttcttcctgtctttgtatgaaattagagctgggatcgctatagtctaggagtgaaggcagcttcgctcagcaggagcatggggggatcctgtctgcatttctgtttccaccatttctccagcttgctggggaaggagggttacagaagcaaagaagtgccagtttccttagaattgtgcttgataactcctcaatgatcacacgccagccgagctgagtacacataagagtatgtgcacataggcgcctccccctctgtccccagagcccatgcg

SEQ ID NO: 48 - DNA, 864 bp, Homo sapiens
  misc_feature (1)...(864): n = a,t,c or g
ttttttttttttgagacacagtctggctatgtcacccaggctgagtacagtagcatgatcctggttcgctgcaacctccacctcccaggctcaagtgatcctcccacctcagcctcctgagtagctaggactacaggtacgtgccacaacacctggctaatttttttattttttgtagagacaagggtctccctacgttgtccaggctggacttgaactcctgggttcaagcgatcctaccaccttggcctcccacagcactggggttacaggcaggagccactgcacctggccctgtctttactgatggtcctgccccatgcctcccacacctaaccctgggcacccactcccgaagctctcctactggctgcagggtctgcctctgtgaggacagtgaagccgatgacacgggaggtgaagtcgaaggccgtctgctggccatcgtggatcactgagatgcagtggcggtccccgtagctggcccgtggcatgccaccctggaagatggtgaagggcaacccctgcctagtggtcagccagaggattctggtaatcgctttgcaaggaaagggaccgtaaggcacgaggctgcggaggggctctggttgctgggcttcgctggacacgggcccactggcagtagctgccgtcagagtgacagctgacgagcaggcggccgtcccgctgccaccagatgttctccagttgctggctgctgaggaagtggtagagcacgcggctgccctgtaggtcccagatgacaacgaggcctcggctgtagccgatcaggatctggttggggtcttcaggtgcttcctgcatgctttcaccatttngaacaaacagccggtgggggccctc

SEQ ID NO: 49 - DNA, 1327 bp, Homo sapiens
tttcgtgagcatttgagggctgtttatgatctatggggtaaaactctctgactgactggatgaggaaaatgaaatgcgagagggttgagcccaaggttcattcatctgctcaatcgaggccactcattctggccactgtgtgccagatgctggggattctgtcctcttgggagctgacgtagcccaggtggtggctgtgggctgctggaggtggggatccaggtggaggagcaagtctagggaagtgtgctggggaggccctctctgaggaggtgacatgccagctgagatctgaatggcaggaaggagtggccatgaggacatgggtgatgacagtctgggtagaaagatgaaggaggggaagcaggtaaggagttgtgatctaattctgggagccactggagggtgaaagcagggattagaagtcagggatttacattttaaagagatcacctctggcagggctttgttaagagtggcctgcaagaggccaagcatggttccagggggccagttgcagagggctggtgcaggagcccaggcaaggattacggggctcagtcctgccctgtggggagcaagagtacacggctggattccagagctgccagcaggcctaccccctggggcctgcctgtggcctctcatccctgcctgtcccagtagacactgggggtgggtaagtgctcccgtgaagggggggcccaggcgattctgggtctggccctgtgtctacaggggagcaccgtggcctgggcgctggcgtctccaaggtgcggagcctgaagatggacaggaaggtgtggacagaaacacttatcgaggtggggatgcccctgcttgccaccgatacttggggtctgccccattcaacagctgtctgggtctcccagccccctccctatctcagtgaccacagcaccttggagctggaaagagaccctttgtgataatatagtgggtggggatttcggaaaagcaatttttggcaaagtcagcaaactggccagtgagctaagaatgtttttatagttgtaaagtgttatttttttttaaagaaaaaaaaaggaagaaaatgcagcagagactgtatgtgttctgtaaagccgaaaataattactatttcgccctttagagaaagaatttgctaacttctgatctaatttcactgtcatccattgaatagatgtgtaaactgaggtcctgggcagggctgtaatctgcctgagattaccctgtaaatgcatattgaccaccatccctgcctctttctgtcccacttctgaatgacccagggccttctcccctaccttgcacagcctgtatt

SEQ ID NO: 50 - DNA, 436 bp, Homo sapiens
ctgtcgtgcaattccgagcaggcactgctcagtctggtgcctgtgcagagggagctacttcgaaggcgctatcagtccagccctgccaagccagactccagcttctacaagggcctaggtacctgcccttcccagctgaggctttctgagcccccaccgacccccagacacctcagcgtagcctctgtctcccatcacatgttcccctctcatcgctccctttgcccacatcttccagacttcttcgccgccccattcccatcagacaatctcccctacaccctccagtcccctttcccctcacctcctccagctactccctctgaccatgctcttatcctccaccacagacttaaatgggggcccagatgaccctctgcagcagacaggccagctcttcgggggcctggtgcgtgatatccggcgccgctacccc

SEQ ID NO: 51 - DNA, 481 bp, Homo sapiens
tcgcctagcagtaagttggttggcatgtggtgggcaggcagggctggcagtagtcggaccacttcagtctccctgctctgccttccccagcaccattcggtgcctcgaacctcctggtgaaccccctggagccccaaaatgcagataagatcaagatcaagatcgcagacctgggcaacgcctgctgggtggtatgagcaagtgtgggagagcagagtggggggccctgctccaagggtggaggcacagggccgctcttggggagccctaccccagtctgcagtgcacgtgaaccgtcggctgggtgggcactggtcctgcccagtcaacagcactggggccatggccaagggcaggggccactaggaagggatcagcctcagcctcagatcactgggcctgtccctcttggaggacctggggaccccgaggctcacagcaaaccccactgagcttctcgggtaggcggatcggggtgggg

SEQ ID NO: 52 - DNA, 435 bp, Homo sapiens
cccgggtcgacccacgcgtccgagctcctcgttgtggagacaagatcaaaaatcatatgtatagaatgtgactgtggctcccttaaagattgtgccagtgatagatgttgtgagacctcttgtaccctttctcttggcagtgtttgcaatacaggactttgctgccataagtgtaaatatgctgcccctggagtggtttgcagagacttgggtggtatatgtgatctaccggaatactgtgatgggaaaaaggaagagtgtccaaatgacatctacatccaggatggaaccccatgttcagcagtatctgtttgtataagaggaaactgcagtgaccgtgatatgcagtgtcaagccctttttggctaccaagtgaaagacggttccccagcgtgctatcgaaaattgaataggattggtaaccgatttggaacg

SEQ ID NO: 53 - DNA, 728 bp, Homo sapiens
ccgggtcgacccacgcgtccggacgccagtttagcccaggtccacggactacaatgtttcgtattcctgagtttaaatggtctccaatgcaccagcggcttctcactgatttactatttgcattagaaactgatgtacatgtttggaggagcccattctacaaagtctgtaatggattttgtcaatagcaatgaaaatattatttttgtacataacacaattcacctcatttcccaaatggtagacaacatcatcattgcttgtggaggaattttacctttgctctctgctgctacatcaccaactggttctaagacggaattggaaaatattgaagtgacacaaggcatgtcagctgagacagcagtaactttcctcagccggctgatggctatggttgatgtacttgtgtttgcaagctctctaaattttagtgagattgaagctgagaaaaacatgtcttctggaggtttaatgcgacagtgcctaaaattagtttgttgtgttgctgtgagaaactgtttagaatgtcggcaaagacagagagacaggggaaataaatcttcccatggaagcagtaaacctcaggaagttcctcaaagtgtgactgctacagcagcttcgaagactccattggaaaatgttccaggtaacctttctcctattaaggatccggatagacttcttcaggatgttgatatcaatcgccttcgtgctgttgtctttcg

SEQ ID NO: 54 - DNA, 2228 bp, Homo sapiens
ttttttttttttcctgaaatgtaaattgtttttaatatatttaagagcacacagaagtcttgatttataaaaaaataaatatataacatgacaaatttactgatgatcctggagctctgaggtcaaactctttaaatgatcagtgaaaacataaaacatccatgatctgttaacacacacaggagcatattccagttgtaaaaaacaaattccttgaaggctcagaacgaacaaaaatcagtctttatggcagaaagcacatccaaagctaggcaatgaagttcagcctgggccacgtgaacctttcaccagccagcctataacctatggagccaggacaggaaagcatgatccttcagctcatgacgccacccaggcttccagacaactgcagaatgaaagagtccctcagaggctccccagcccctgctgccatcataaagcacgggagggattgttttgtccttagcggctctgtcctaaatttgagagcaggagactgagaaggttatgctcattaaatattgtcattgtaacacggaatggaaatcatgatccttgcccatgggcactgagctgaaagaaagaggaacctcacatgaggctttcctagagaccaggatgttgggtgagtgggcgtgcacttctcaagtgggcaaggaagaactgcttttctccagctgacatgctctcaggggtgaagaagtttagcttaaaatacctgatggcgctgcataaactggggatttgggaactgagtttttagctctgtgacacacaacataaaaaacaaaaatccagtctcattagctaaattcggattaaaatctgaaatgtttttatggagttgccaacaggctggaatgtacctgatacaatttaatctgcttttatttctttggctgtcttccaaaccactttcttcctgtaattcttaagttggctagttctccttcctcagaaaaattacccctaagaatcttcctaatagtgagggtgtacttccgaatagaagagtccttcggctgaaatggcatctccaaggcctacagttcgaatggggtctttacacaccaatactggtgtgaagtggaaggatattccctctctgtgccattctactactggcttgtttgggtttaatacaatcctggagcctgcctccgaatgggaagtcatgaactcttggggtgccctcagagacactcggctggtgtctatggtttctgtggcgcaggcctgtgtcccagccacacgagctcctgcagccacggctgccagctggttggcccagtgtccatccacagttgccaggatgtggtagaccagcgtgtggaaatggatcctggtgagatccgaggctctgcttttactcctcccatgttctttcaagatccagaagaggatgtcactgaccatgcccacatcaggaacaccgttccaggaagagagagaagagtgaggtccagaggctgactgggtgagaaataacagctcctgttcattcagcccaagggaagtcaccgcgggaaagacctgctgaaggaacaatgctgctcatgagctccctgttagtcatactggcccagctctaggtgaaactggaataccagtggggatgtcagaaatggaggttacaacctccaagagtctcttcctctggagctccttgctttgtccctccatcatgtgcaatccagagaggccccccaggtctggctgaaactcctccaggctagacacaaacacctccagcatattcatggccccgttggagaggtcgtgagagaagatgaatcggttggcatggggagcttttaactggccccactcctcccctgcttgatactctaaaatgaggtggaactcatccacttcctgcaatgactctggtggaacaaagacattgtcatcaagaagctcatgtagctttggaccaactggaccgcaaagaagaacctttaaatctgagttggctgcaaatttctgtccaattaaagctgcatttcctcctacatagtgctgggctcctgggaactctgacgcaacctgggcaatgtcgtgaaaagtttccttatcactgaagaagcgctcagcagctgctcccttccccatgaagtgaatgaaggcttcttccagatcattccttgaatgcagaatgctgtgatctttcccattcccaggactaaggccaagtgcctgcaagagcttcacccctgaggaattca

SEQ ID NO: 55 - DNA, 405 bp, Homo sapiens
gcaggagttcaagaccaacgtggccaacatggggaaagcccatcactactaaaaatacaaaaactagccaggcgtggtgacacacatctgtaatcccagctactcgaggcgctgaggcaggagaatcacttgaaccaggaggcagaggttgcagtgagccgagatcatgccactgcactccagcctgggccacagagcaagactccatctgacaactagctgttccagcccccagccacttgagtcatctcagctgaggccccacacaccaagaagcagaggtgagtctaatccacagagccctggtcagacatgatgacggtggcttcacccgggggtctccgcacagcagcggcctcgggtaagcagaacctcgctccggggtttacaaatccttcctcgtgc

SEQ ID NO: 56 - DNA, 1652 bp, Homo sapiens
actaggggaggtgctcaagtgccagcagggcgtatccagtctggcctttgccctggccttcttgcagcgcatggacatgaagccgctggtggtcctggggctgccggcccctacggctccctcgggctgtctttccttctgggaggccaaggcgcagctggccaagagctgcaaggtgctggtagacgcgcttcgacacaacgccgccgctgctgtgccattttttggcggcgggtctgtgctacgcgctgccgagccggctccccatgccagctacggcggcatcgtctcggtggagacagacctgctgcagtggtgcctggagtcgggcagcatccccatcctgtgccccatcggggagacggccgcgcgccgctccgtgcttctcgactccctggaggtgaccgcgtcgctggccaaggcgctgcggcccaccaaaatcatcttcctcaataacacaggcggcctgcgcgacagcagtcataaggtcctgagtaacgtgaacctgcccgccgacctggacctggtgtgcaacgccgagtgggtgagcacaaaagaacggcagcagatgcggctcatcgtggacgtgctcagccgcctgccccaccactcctcggccgtcatcaccgccgctagcacgctgctcactgagctctttagcaacaaggggtccgggaccctgttcaagaacgccgagcgaatgctacgggtgcgcagcctggacaagctggaccagggccgtctagtggacctggtcaacgccagcttcggcaagaagctcagggacgactacctggcctcgctgcgcccgcggctgcactccatctacgtctccgaggggtacaacgccgccgccattctgaccatggagcccgtcctggggggcaccccgtacctggacaaatttgtggtgagctccagccgccagggccaaggctccggccagatgctgtgggagtgcctgcggcgggaccttcagacacttttctggcgctcccgggtcaccaaccccatcaatccctggtacttcaaacacagtgatggcagcttctccaacaagcagtggatcttcttctggtttggcctggctgatatccgggactcctatgagttggtcaaccacgccaagggactgccagactcctttcacaagccagcttctgacccaggcagctgaccctcaccatggacactacaggccctggaatggccagggtggaccaaaagccatgcccagctgggcatgaccccaggcagccagccacaggctgaagggggcttgttggctgagtgatctgcagaggagaaagcagcccccagctctgccccagaggaggcgctgaagtgggacaagcacaggaaagaaggggaccagtctaggaccccaacttgactcactctaaagctacaaccaaatggccttcgattttcaacctggggattaggggaggggagggtgccttccagggctcttactcaggacttaacccttaagggtgagcttagtttctgtcctcttgtgcttatgttttgaggctcccttacccaaaataatacccctgcctgcgtgatattctaccattcattttaattcctttgggtcttgcagtttttcaggaggccttgattaaaatgcaaatacttgtctgaga

SEQ ID NO: 57 - DNA, 1129 bp, Homo sapiens
ttttttttttttgagacggagtctcgctctgtggcccaggctggagtgcagtggcgcgatctcggctcactgcaagctccgcctcccgggttcacgccattctcctgcctcagcctcccgagtagctgggactacaggcgcccgctaccacgcccggctaattttttgtatttttagtagagacggggtttcaccgtgttagccaggatggtctcgatctcctgacctcgtgatccgcccgcctcggcctcccaaagtgctgggattacaggcgtgagccaccgcgcccggcccatttactaaatgttaagttccttataattccatctctttcagcacccaatacaggggtttacatagaggaagtactcaatatttcctttctttttttcttttttttctggagatagtctcgctctgtcaccaggctggagtgcagtggcgtaatctcggctcactgcaacctccacctcctgggttcacgccattctcctgcctcagcctcccgagtagctgggactacaggcgcccaccatcacgcccggctaattttttttgtatttttagtagagatggggtttcaccgtgttagccaggatggtctcgatctcctgaccttgtgatccgcccgcctcggcctcccaaagtgctgggattacaggtgtgagccaccgcgcccggcctaaaaaaattttttttttcttgagacaaagtcttgctctgttgcccaggctgaagtgcaggggcatgatatcagctcattgcaacctccacctcccgggttcaagcgattctcctgcctcagcctcccgagtagctgggattacaggtgccctccgccacgtccagctaattttctgttttttagtagagacggggtttcaccgtgttagccaggatggtctcgatctcctgacctcgtgatccacctgcctcagcctcccaaagtgctgggattacaggcgtgagccactgagcccagccccattttatttcatttctctaacagcaatgatatatatacatcccatagtatatcctactgatataatagcccctttccccattcaacacctgtgtaatcaggaaataaaaccctcgtgcagcattggcgtctggatagtcctcg

SEQ ID NO: 58 - DNA, 475 bp, Homo sapiens
gttccgcccaattggcataatacgccaagccctgtgctctgcagacggccaccagagaaggatccttactctgcgcctgggattgctcgttatcccgtttctccccgcaagtaacctgttcttccgagtgggcttcgtggtcccgagcgtggggtgctgtgtgatgctgctttttggattcggagcctgcgcaaacacaccgagaaaaagaagctcatcgctgccgtggtgctgggaatcctactcagcaagatgctgagaggctgagatgcgcggtgcgcggcggcgagtggcggagcgaggggcggttttcagaggcgctgtgtctgtgtgtcccctcagtgctgaggttcgctgcaacatcggcagaaacctggctgctaaaggcaaccaaacgggcgccatcagataccaccgggaagctgtaagcttaaatcccaagacgaaatcgtcgacacgggaattccggccttgc

SEQ ID NO: 59 - DNA, 711 bp, Homo sapiens
ggaaaatagcagattttgggttcagtaacctcttcactcctgggcagctgctgaagacctggtgtggcagccctccctatgctgcacctgaactctttgaaggaaaagaatatgatgggcccaaagtggacatctggagccttggagttgtcctctacgtgcttgtgtgcggtgccctgccatttgatggaagcacactgcagaatctgcgggcccgcgtgctgagtggaaagttccgcatcccattttttatgtccacagaatgtgagcatttgatccgccatatgttggtgttagatcccaataagcgcctctccatggagcagatctgcaagcacaagtggatgaagctaggggacgccgatcccaactttgacaggttaatagctgaatgccaacaactaaaggaagaaagacaggtggaccccctgaatgaggatgtcctcttggccatggaggacatgggactggacaaagaacagacactgcagtcattaagatcagatgcctatgatcactatagtgcaatctacagcctgctgtgtgatcgacataagagacataaaaccctgcgtctcggagcacttcctagcatgccccgagccctgggcctttcaagcaccagtcaatatccaggcggagcaggcaggtactgctatgaacatcagcgttccccaggtgcagctgatcaacccagagaaccaaattgtg

SEQ ID NO: 60 - DNA, 344 bp, Homo sapiens
ggcacgagaatttttaggccaccgagcttctataacatggtcatgagctcgggtgcaccatagatttcccaaagctgaggttgcataacccctctgctgaggacagatcttaccgaagatcgcacgaagtgctgccatggagatctgcttgaatgcgctgatgacagggcagaccttgtcgaggatatctgggaaaatcaagattcaatctccactatactgattgaatgctgtgaaaaacctctgttggaaaaatcccactgcattgccgaagtggaaaatgatgagatgcctgctgacttgccttcattagctgctgattttgttgaaagtaaggatgtttg

SEQ ID NO: 61 - DNA, 594 bp, Homo sapiens
gcttgagctcgagcgacggcgctggcggagacgccggctgctcctcccctccccgccgcttttcctaaaaggattgtacaccttagaagtgcttaaggaagagtgatgaagctctgaatcgtgtcctgcagcagattctgagtgccacccaagatgaagagagggacaagcttgcatagtaggcggggcaagccagaggccccaaagggaagtccccaaatcaacaggaagtctggtcaggagatgacagctgttatgcagtcaggccgacccaggtcttcatccacaactgatgcacctaccggctctgctatgatggaaatagcttgtgctgctgctgctgctgctgctgcatgtctaccaggagaggagggaactgcggagcggatcgaacggttggaagtaagcagccttgcccaaacatccagtgcagtggcctccagtaccgatggcagcatccacacagactctgtggatggaacaccagaccctcagcgcacaaaggctgccattgctcacctgcagcagaagatcctgaagctcacagaacaaatcaagattgcacaaacagcccgacgaaatcgtcgacccggg

SEQ ID NO: 62 - DNA, 1609 bp, Homo sapiens
  misc_feature (1)...(1609): n = a,t,c or g
cgaagttatggccttccttataaggaaaaggggtggattggaggaatcgccaattgaagtttcgaaggatcgctttagctgaatatcagagaaccttgtgaagatcttaaagagcaactaaagcataaagaatttcttctggctgctaatacttgtaaccgtgttggtggtctttgtttgaaatgtgctcagcatgaagctgttctttcccaaacccatactaatgttcatatgcagaccatcgaaagactggttaaagaaagagatgacttgatgtctgcactagtttccgtaaggagcagcttggcagatacgcagcaaagagaagcaagtgcttatgaacaggtgaaacaagttttgcaaatatctgaggaagccaattttgaaaaaaccaaggctttaatccagtgtgaccagttgaggaaggagctggagaggcaggcggagcgacttgaaaaagaacttgcatctcagcaagagaaaagggccattgagaaagacatgatgaaaaaggaaataacgaaagaaagggagtacatgggatcaaagatgttgatcttgtctcagaatattgcccaactggaggcccaggtggaaaaggttacaaaggaaaagatttcagctattaatcaactggaggaaattcagagccagctggcttctcgggaaatggatgtcacaaaggtgtgtggagaaatgcgctatcagctgaataaaaccaacatggagaaggatgaggcagaaaaggagcacagagagttcagagcaaaaactaacagggatcttgaaattaaagatcaggaaatagagaaattgagaatagaactggatgaaagcaaacaacacttggaacaggagcagcagaaggcagccctggccagagaggagtgcctgagactaacagaactgctgggcgaatctgagcaccaactgcacctcaccagacaggaaaaagatagcattcagcagagctttagcaaggaagcaaaggcccaagcccttcaggcccagcaaagagagcaggagctgacacagaagatacagcaaatggaggcccagcatgacaaaactgaaaatgaacagtatttgttgctgacctcccagaatacatttttgacaaagttaaaggaagaatgctgtacattagccaagaaactggaacaaatctctcaaaaaaccagatctgaaatagctcaactcagtcaagaaaaaaggtatacatatgataaattgggaaagttacagagaagaaatgaagaattggaggaacagtgtgtccagcatgggaggagtacatgagacgatgaagcaaaggctaaggcaggtggataagcacaggcaggccacagcccaggaggtggtgcaggtccccagaagcaggaccngcttcttccnggagagggagggnctgtcggaagaggtgggnccgncttggggnccnngttacccagnatncncaatcttttttggttgacccggttggacagggtggacttnantgttttncaaaggngntttttcattccancttgttttngcttaatttngcncaacgnacccacggcctncccggnntgaaaccccccnccctgagggggggttntccccc

SEQ ID NO: 63 - DNA, 615 bp, Homo sapiens
catcctatcccgtgtggtggaattcgccgctgactgctgaggtgccacccgagctgctggctgctgccggcttcttccacacaggccatcaggacaaggtgaggtgcttcttctgctatgggggcctgcagagctggaagcgcggggacgacccctggacggagcatgccaagtggttccccagctgtcagttcctgctccggtcaaaaggaagagactttgtccacagtgtgcaggagactcactcccagctgctgggctcttgggacccgtgggaagaaccggaagacgcagcccctgtggccccctccgtccctgcctctgggtaccctgagctgcccacacccaggagagaggtccagtctgaaagtgcccaggagccaggaggggtcagtccagccgaggcccagagggcgtggtgggttcttgagcccccaggagccagggatgtggaggcgcagctgcggcggctgcaggaggagaggacgtgcaaggtgtgcctggaccgcgccgtgtccatcgtctttgtgccgtgcggccacctggtctgtggctgagtgtgcccccggcctgcagctgtgccccatctggcagaagcccccgtcccgcagccgg

SEQ ID NO: 64 - DNA, 839 bp, Homo sapiens
  misc_feature (1)...(839): n = a,t,c or g
aagaatgtctggaagagatggaagaaaaggttttttgtattggtgcaggtcattcagtacacgtttgccatgtgcagttatcgggagaagaaagcggagcctcaggaacttctacaattggatggctacactgtggattacaccgacccccagccaggtttggagggtggccgagccttcttcaatgctgtcaaggagggagacaccgtgatatttgccagtgacgatgaacaagaccgcatcctgtgggtccaggccatgtatcgggccacggggcagtcacacaagcctgtgcccccgacccaagtccagaaactcaacgccaagggaggaaatgtacctcagctggatgcccctatctctcaattttacgcagatagagctcaaaaacatggcatggatgaatttatctcttccaacccctgtaactttgaccacgcttccctctttgagatggtacaacgccttactttggatcacagacttaatgattcctattcttgcctgggctggttcagtcctggccaggtgtttgtactagacgagtattgcgcccgaaatggagtccgggggtgtcaccgacatctctgctacctcagagacttgcttgaacgggcagaaaatggcgccatgatcgaccccacccttnttcactacagctttgccttctgtgcatcccatgtccatgggaacaggcctgatggaattgggaactgttgactgttgaagaaaaggaacgttttttgaaggaaatcaaaagaggaggnttccgnagttctgctaagaaaaatcaggttacaacattttaggnaattgcttttcccatttgggtcgaacct

SEQ ID NO: 65 - DNA, 1678 bp, Homo sapiens
caagcagctgatcgtgctgggaaacaaagtggacctcctgccccaggatgctcctggctaccggcagaggctgcgggagcgactgtgggaggactgtgcccgcgccgggctcctgctggcccctggccaccaagggccacagcgccccgtcaaggacgagccacaggacggggagaatccgaatccgccgaactggtcccgcacagtggtcagggacgtgcggctgatcagcgccaagaccggctatggagtggaagagttgatctctgcccttcagcgctcctggcgctaccgtggggacgtctacttagtgggcgccaccaacgccggcaaatccactctctttaacacgctcctggagtccgattactgcactgccaagggctccgaggccatcgacagagccaccatctccccttggccaggtactacattaaaccttctgaagtttcctatttgcaacccaactccttacagaatgtttaaaaggcatcaaagacttaaaaaagattcaactcaagctgaagaagatcttagtgagcaagaacaaaatcagcttaatgtcctcaaaaagcatggttatgtcgtaggaagagttggaaggacattcttgtattcagaagaacagaaggataacattccctttgagtttgatgctgattcacttgcctttgacatggaaaatgaccctgttatgggtacacacaaatccaccaaacaagtagaattgactgcacaagatgtgaaagatgcccactggttttatgacacccctggaattacaaaagaaaattgtattttaaatcttctaacagaaaaagaagtaaatattgttttgccaacacagtccattgttccaagaacttttgtgcttaaaccaggaatggttctgtttttgggtgctataggccgcatagatttcctgcagggaaatcagtcagcttggtttacagtcgtggcttccaacatcctccctgtgcatatcacctccttggacagggcagacgctctgtatcagaagcatgcaggtcatacgttactccagattccaatgggtggaaaagaacgaatggcaggatttcctcctcttgttgctgaagacattatgttaaaagaaggactgggggcatctgaagcagtggccgacatcaagttttcctctgcaggttgggtttcagtaacacctaattttaaggacagactgcatctccgaggctatacacctgaaggaacagttttgaccgtccggccccctctcttgccatatattgttaacatcaaaggacagcgcatcaagaaaagtgtggcctataaaaccaagaagcctccttcccttatgtacaacgtgaggaagaagaaaggaaagataaatgtatgagaccgaccttgttcactccagatattaactgtattgaacacaacaaaatacattgaatttgtattaaacatataacgcataaataaagctcccattcttacccttaaaaataaaaggagaatgaaaaaaaaagatgccaataggcatatacgtggttttgggtattccggggtcttcccgtggtctgttcactttgcggtggtggtgatatattaggcagtcggggcgcctgatgtacgccttcttatagaggtacatggttggatgcagcgtcttgacgtgggattcgctttattcgcc

SEQ ID NO: 66 - DNA, 1888 bp, Homo sapiens
tccacggtggcatccatgatgcatcgtcaggagactgtggagtgtttgcgcaagttcaatgcccggagaaaactgaagggtgccatcctcacgaccatgcttgtctccaggaacttctcagctgccaaaagcctattgaacaagaagtcggatggcggtgtcaagccacagagcaacaacaaaaacagtctcgtaagcccagcccaagagcccgcgcccttgcagacggccatggagccacaaaccactgtggtacacaacgctacagatgggatcaagggctccacagagagctgcaacaccaccacagaagatgaggacctcaaagctgccccgctccgcactgggaatggcagctcggtgcctgaaggacggagctcccgggacagaacagccccctctgcaggcatgcagccccagccttctctctgctcctcagccatgcgaaaacaggagatcattaagattacagaacagctgattgaagccatcaacaatggggactttgaggcctacacgaagatttgtgatccaggcctcacttcctttgagcctgaggcccttggtaacctcgtggaggggatggatttccataagttttactttgagaatctcctgtccaagaacagcaagcctatccataccaccatcctaaacccacacgtccacgtgattggggaggacgcagcgtgcatcgcctacatccgcctcacccagtacatcgacgggcagggtcggccttcgaacccagccaagtcagaagaagacccgggtctggcacccgtcgggaatggcaagtggctcaatgtccactatcactgctcaggggccccctgcccgcaccgctgcagtgagctcagccacaggggcttttaggagattccagccggaggtccgaaccttcgcagccagtggctctggagggcctgagtgacagcggccagtcctgtttgtttgaaggtttaaaacaattcaattacaaaagcggcaagcagccaatgcacgcccctgcatgcagccctcccgcccgcccttcgtgtctgtctctgctgtaccgaggtgttttttacatttaagaaaaaaaaaaaagaaaaaaagattgtttaaaaaaaaaaggaatccataccatgatgcgttttaaaaccaccgacagcccttgggttggcaagaaggcaggagtatgtatgaggtccatcctggcatgagcagtggctcacccaccggccttgaagaggtgagcttggcctctctggtccccatggacttagggggaccaggcaagaactctgacagagctttgggggccgtgatgtgattgcagctcctgaggtggcctgcttaccccaggtctaggaatgaacttctttggaacttgcataggcgcctagaatggggctgatgagaacatcgtgaccatcagacctacttgggagagaacgcagagctcccagcctgctgtggaggcagctgagaagtggtggcctcaggactgagagcccggacgttgctgtactgtcttgtttagtgtagaagggaagagaattggtgctgcagaagtgtacccgccatgaagccgatgagaaacctcgtgttagtctgacatgcactcactcatccatttctataggatgcacaatgcatgtgggccctaatattgaggccttatccctgcagctaggagggggaggggttgttgctgctttgcttcgtgttttcttctaacctgggcaaggagagagccaggccctgggcaaggctcccgtgccgcctttgggttccttgttttcttgttgcttgatctggaccatctttgtctttgccttttcacggtagggtccccatgctgaccctcatcttgggcctgggcctcttgccaaagttgcccctg

SEQ ID NO: 67 - DNA, 1712 bp, Homo sapiens
ctttacccaagaatgtggtattcgtgcttgacagcagtgcttctatggtgggaaccaaactccggcagaccaaggatgccctcttcacaattctccatgacctccgaccccaggaccgtttcagtatcattggattttccaaccggatcaaagtatggaaggaccacttgatatcagtcactccagacagcatcagggatgggaaagtgtacattcaccatatgtcacccactggaggcacagacatcaacggggccctgcagagggccatcaggctcctcaacaagtacgtggcccacagtggcattggagaccggagagtgtccctcatcgtcttcctgacggatgggaagcccacggtcggggagacgcacaccctcaagatcctcaacaacacccgagaggccgcccgaggccaagtctgcatcttcaccattggcatcggcaacgacgtggacttcaggctgctggagaaactgtcgctggagaactgtggcctcacacggcgcgtgcacgaggaggaggacgcaggctcgcagctcatcgggttctacgatgaaatcaggaccccgctcctctctgacatccgcatcgattatccccccagctcagtggtgcaggccaccaagaccctgttccccaactacttcaacggctcggagatcatcattgcggggaagctggtggacaggaagctggatcacctgcacgtggaggtcaccgccagcaacagtaagaaattcatcatcctgaagacagatgtgcctgtgcggcctcagaaggcagggaaagatgtcacaggaagccccaggcctggaggcgatggagagggggacaccaaccacatcgagcgtctctggagctacctcaccacaaaggagctgctgagctcctggctgcaaagtgacgatgaaccggagaaggagcggctgcggcagcgggcccaggccctggctgtgagctaccgcttcctcactcccttcacctccatgaagctgagggggccggtcccacgcatggatggcctggaggaggcccacggcatgtcggctgccatgggacccgaaccggtggtgcagagcgtgcgaggagctggcacgcagccaggacctttgctcaagaagccataccagccaagaattaaaatctctaaaacatcagtggatggtgatccccactttgttgtggatttccccctgagcagactcaccgtgtgcttcaacattgatgggcagcccggggacatcctcaggctggtctctgatcacagggactctggtgtcacagtgaacggagagttaattggggcacccgcccctccaaatggccacaagaaacagcgcacttacttgcgcactatcaccatcctcatcaacaagccagagagatcttatctcgagatcacaccgagcagagtcatcttggatggtggggacagactggtgctcccctgcaaccagagtgtggtggtggggagctgggggctggaggtgtccgtgtctgccaacgccaatgtcaccgtcaccatccagggctccatagcctttgtcatcctcatccacctctacaaaaagccggcgcccttccagcgacaccacctgggtttctacattgccaacagcgagggcctttccagcaactgcagggtcttctgtgagtctggcatcctgattcaggaactgacccagcagtccgtggcagttgctggtcga

SEQ ID NO: 68 - DNA, 839 bp, Homo sapiens
gttttttctcgagcaggttagccaatatacctttgctatgtgcagttatagagaaaagaagtctgaaccacaagaattaatgcagcttgaaggctatactgtggattataccgatccccacccaggccttcagggtggttgtatgttctttaatgctgttaaagaaggagatactgtaatctttgccagtgatgatgaacaggacagaatattatgggttcaagccatgtatagggccacaggtcaatcatataaaccagttcctgcaattcaaacccagaaactgaatcctaaaggaggaactctccatgcagatgctcagctttatgcagatcgttttcagaaacatggtatggatgagtttatttctgcaaacccctgcaagcttgatcatgccttcctttttagaatactccagaggcagactttggatcacagactgaatgattcctattcttgcttgggatggtttagccctggccaagtctttgtgttagatgagtactgtgcccgttatggtgtgagaggctgtcacagacatctctgctaccttgcagaactgatggaacattcagaaaatggtgctgtcattgaccctaccctgctccattacagctttgcattctgtgcctctcgatgtgcacggcaacaggcctgatggaattgggactgtttcagtggaagaaaaagaaagatttgaggagataaaagagagactctcttcccttttagaaaatcagataagccatttcagatactgttttccctttggacgacctgaaggtgctctaaaagctacactttcattacttgaaagggttttaatgaaagatattgcc

SEQ ID NO: 69 - DNA, 801 bp, Homo sapiens
  misc_feature (1)...(801): n = a,t,c or g
agacgggctgctccatgaggtgctgaacgggctcctagatcgccctgactgggaggaagctgtgaagatgcctgtgggcatcctcccctgcggctcgggcaacgcgctggccggagcagtgaaccagcacgggggatttgagccagccctgggcctcgacctgttgctcaactgctcactgttgctgtgccggggtggtggccacccactggacctgctctccgtgacgctggcctcgggctcccgctgtttctccttcctgtctgtggcctggggcttcgtgtcagatgtggatatccagagcgagcgcttcagggccttgggcagtgcccgcttcacactgggcacggtgctgggcctcgccacactgcacacctaccgcggacgcctctcctacctccccgccactgtggaacctgcctcgcccacccctgcccatagcctgcctcgtgccaagtcggagctgaccctaaccccagacccagccccgcccatggcccactcacccctgcatcgttctgtgtctgacctgcctcttcccctgccccagcctgccctggcctctcctggctcgccagaacccctgcccatcctgtccctcaacggtgggggcccagagctggctggggactggggtggggctggggatgctccactgtccccggacccacagctgtcttcacctcctggctctcccaaggcagctctacactcacccgtctaaaaaaaggcccccgtaattccccccgacatgnnnccccgctctagaggatcaagcaactacgcggcggctcacgacgc

SEQ ID NO: 70 - DNA, 531 bp, Homo sapiens
agaagggtgtcccaaccttgctcatggcagctggcagcttctatgacattctggccatcactggcttcaacacatgcttgggcatagccttttccacaggctctactgtctttaatgtcctcagaggagttttggaggtggtaattggtgtggcaactggatctgttcttggatttttcattcagtactttccaagccgtgaccaggacaaacttgtgtgtaagagaacattccttgtgttggggttgtctgtgctagctgtgttcagcagtgtgcattttggtttccctggatcaggaggactgtgcacgttggtcatggctttccttgcaggcatgggatggaccagcgaaaaggcagaggttgaaaagataattgcagttgcctgggacatttttcagccccttctttttggactaattgggagcagaggtatctatttgcatctctcagaccagaaactgtaggcctttgtgttgccaccgtaggcatttgcagtattgatacgaatttttgactacattttctgaa

SEQ ID NO: 71 - DNA, 540 bp, Homo sapiens
tgtgcgaggaattcgaatcaggtaatggagaggactggcatgaagggggcacaggactgtgaaaacctgagtgattctgtccttccctcatcctctatccctgaaccagggcagacatagatggaatcagagcaggagttggtgttgatgtggtttcaggtccacctatcagagtttgagagatttaggccatgaaccattatgaatatagatgagaacctttgtaattgctgaaggaggtagtagtgcaggcaagtcctgtgtgcaagacctgctgctcccagttagtacggacccctgtgacattcacagaagttcagaatgtctgagatgctctgcaggctaccttatctccgtctgcagctacacctccagtgatcacaatcagtgctacgctggcacagccagcctggccctgctctggattggaggcatcctcaagggctgcttgctgtggaagcagtttcgctggaccgagaggagccactggaattttgggtactgggccttatggtcacccgggaatgggaatggctgctg

SEQ ID NO: 72 - DNA, 428 bp, Homo sapiens
cggacgcgtccgcccacgcgtccgcccacgcgtccgctagaaatttctgtggaactccatttgactttctatctgtgaaatccaaactgtctctgaagaaataagaaaaatagtgttttgacttttaggagacaactatgtttattattttgccttgcaaattaatgtctaaatttgtacaagcacctatctacagatttttccaggtaaaccatcatgttttatgtgtaaaggtagattgatgtgcatttactttatactttggtacttaggccattacacatctttgcactggaattggtgcagatatataagtgatcctaatgttgatgctgcccagaccccaggaatgcagaggtgagcatgacacacacagtccctgccctgatggagctcatagactagtgaaggaatagggctctatgacc

SEQ ID NO: 73 - DNA, 584 bp, Homo sapiens
gctggagtcattgcctggtttcaaagagattgtgagcaggggagtaaaagtggattacttgactccagacttccctagtctctcgtatcccaattattataccctaatgactggccgccattgtgaagtccatcagatgatcgggaactacatgtgggaccccaccaccaacaagtcctttgacattggcgtcaacaaagacagcctaatgcctctctggtggaatggatcagaacctctgtgggtcactctgaccaaggccaaaaggaaggtctacatgtactactggccaggctgtgaggttgagattctgggtgtcagacccacctactgcctagaatataaaaatgtcccaacggatatcaattttgccaatgcagtcagcgatgctcttgactccttcaagagtggccgggccgacctggcagccatataccatgagcgcattgacgtggaaggccaccactacgggcctgcatctccgcagaggaaagatgccctcaaggctggtagacactgtcctgaagtacatgaccaagtggatccaggagcggggcctgcaggaccgcctgaacgtcattatt

SEQ ID NO: 74 - DNA, 348 bp, Homo sapiens
ggcacgagattttcatccaaaacaaacactggacttcctgcggagtgacatggctaattcgaaaatcacagaagaggtgaaaaggagtatagcacaacagtatctagatttgacagtagcccggaacaagtggaccctgatgccgaagtcgatgcagccccatctaccacatcttcatgtggacattgagattcacacgctggctcctgaagggtgctcagtctccttggtgattaaggtcctgcttgaactggtgccaactccatggcagggaagttgcttttggttgcctggctgggtttcccagatcccttctggggcaaggagctatcagaccctgctttcaag

SEQ ID NO: 75 - DNA, 365 bp, Homo sapiens
caagcaaagtggggatgtcacctgcaactgcactgatgggcgcttggcccccagctgcctgacctgcgtcggccactgcatttttggcggctactgtaccatgaacagcaaaatgatgcctgaatgccagagcccaccccacatgacagggccccggtgtgaggagcacgtcttcagccagcatcagccaggacatataacctccatcctaatccctatgctgtagctgctgctgctggttctggtggccggagtgatattctgccataaacggcgagtccaaggggctaagggcttccagcaccaacggatgaccaacggggccatgaacgcgcagattgcaaaccccacctacaagatgtacc

SEQ ID NO: 76 - DNA, 700 bp, Homo sapiens
caagaaccatcagcaccaacacaaatgtatctttgcagaccgaaggaatcagctaaacaatttacagtcatctcaatctctactaaaacaaaaatcacatccaacatgccacctgacaccatttctttctctctctctcttttgctccttgcgatgaggcattcatctctccttgagcctccgttctgaagagataacagtatagcaacaactctgccactgaaatcctgttctctgaccgatattggcacctgcaaagagaaacaaccagtaacaggcagcagcagcatcagtattaatcttccatgatgaaatctttacaggtcaagaacaagtacacagctcttttctcactccttcacagtggaccatgcaactagttgaggtggaagacaatggattgtctacaagccttttgaacagtggagaatgcagggcgttggctttaggaagaggcagaaatccaggcagaacttgaacgtttggaaagagtcagaaatcttcacatacgtgagctgaaaagaataaacaatgaagataattcacagttcaaagatcacccaacattaaatgaaagatatttattacttcatctgcttggtagaggtggctttagtgaagtgtataaggtaatgtatggtttattctggtttttttacactaatgtagcaaggatataggagtatgtggttaagaagtg

SEQ ID NO: 77 - DNA, 426 bp, Homo sapiens
ttgcctagcacatggcagggtgcagcgcctgtctgaatgtgtgaagagttcttagtgatgggtaaagggtgttcctgtgtgttttagattctgctcagcaatcctcagatgtggtggttaaatgattccaatcctgaaaccgacaaccgtcaagaaagtccttcccaggaaaacattgaccgagtgagtgacaggcctttgtgccctcagcttggacagcctcgggtggggttgcttggggtaacctgggtgaatcaggcagcaggactgggggagtccgtgctgaaaccttggctcccaggctccaggtgtaacctgcccacctcagaggccacccacgcagtaacagagggcaggggaggcctccttggaaagcaggaaaactggggaagtgtcaggaagttctctttaggtttgctgcctttg

SEQ ID NO: 78 - DNA, 358 bp, Homo sapiens
tttcgtgctatgttcttggctgttcaacacgactgcagacccatggacaagagcgcaggcagtggccacaagagcgaggagaagcgagaaaagatgaaacggacccttttaaaagattggaagacccgtttgagctacttcttacaaaattcctctactcctgggaagcccaaaaccggcaaaaaaagcaaacagcaagctttcatcaagtaagttgagaatcctgagcttgcaaatatcaatagttagctgctgaactgaaaaggggaactctgatgagcgtaagctaacatacagaacctctcttgcaggccttctcctgaggaagcacagctgtggtcagaagcatttgacgagg

SEQ ID NO: 79 - DNA, 322 bp, Homo sapiens
gggtttttcaatttttccagcccaaagttaaaaggttggaaaatcaattcctctttggtcctagagataaggaagaacatacttcgtttcttagatgcagaacgagatgtgtcagtggtcaagagcagttttccaagcaaagacgccagacactccagtgtgcaccggtagttcacccaactgcattggggaccgccctctcatactccagccaggccgtgacgtgaccgacctccgacttctgcgcaaaggcagcgcaagccgttgggatcccctgctccccctcgctcaacagtcgggccattacacctttcatactgcg

SEQ ID NO: 80 - DNA, 310 bp, Homo sapiens
cgaaagcacgccagaaaacaaaataaaagcaatacataaccacaaaaataatagcgtatagatgatcaacaagaattaaaacgcgtaacatagtatagtcaaaaagaatacacgaaaaagaaactccataaaaaatgcaatatcatacaggcagatatcaagccagacaatatcctggataatgaatccataactattctaaagcttagcgattttgggtcggcttcacatgttgcggataatgacataacaccttcatcttctcagaccacatccgctgcatcatcgcccccgcggacgctacgccgcg

SEQ ID NO: 81 - DNA, 134 bp, Homo sapiens
tcgagtaaaccatgggactaaagcttggctccaaagcattcaggctgaacgaaaaacatggactgctattgcataataccaacgtgcattggacgagaacgatgctatggaacctgcataggcgacacggtcgg

SEQ ID NO: 82 - DNA, 358 bp, Homo sapiens
ctctgggagagaaagactaatgggcaggatcccattacttcattggtaaagatagtcggatactctcaccacttttaatacctttagtattacagttgatcagattacctttacttgatatgaattatttctaagttcattcccctgtgttgtagcttatttcaacaattccaactagccgtttaaaattcctcaaagaaactggtcatggaacaccaatggaagaaatacctgaggaggaattatcagaggatgttgaacagattgatcacgctgatagggagttgcggcgtggccaaaacttgaggtgcaaaggaattcatagattgcctactcatatacaagtagggcaaaatcg

SEQ ID NO: 83 - DNA, 723 bp, Homo sapiens
tacacacacacacacacacacacacacactcactctctcagaggagagaaaatattaagaatcgtgtattttacacaggtatccaaacataaaaatactttagaattgcttactgtatggacaggttatatggaatggagtttgtagtatccacattaacaaagcaagtttatatggactggttatgatattagggatatgaattagaaatggatgttgttgcactcatttaaaatattttgcctctcactttatccccagttatagtgtccttttgaatttttctcacacagtgctactatatttcatgaactggtatataaacaaaccaaaattatttcttcaaatcaagaacttatctacgaagggcgacgcttagtcttagaacctggaaggctggcacaacatttccctaaaactactgaggaaaaccctatatttgtagtaagccgggaacctctgaataccataggattaatatatgaaaaaatttccctccctaaagtacatccacgttatgatttagacggggatgctagcatggctaaggcaataacaggggttgtgtgttatgcctgcagaattgccagtaccttactgctttatcaggaattaatgcgaaaggggatacgatggctgattgaattaattaaagatgattacaatgaaactgttcacaaaaagacagaagttgtgatcacattgggatttctggtatccaga

SEQ ID NO: 84 - DNA, 407 bp, Homo sapiens
ggcacgaggaaaatgggacccaccgtctctcccatctgcctaccaggcacctggggcgactacaacctcatggatggggacctgggactgatctcaggctggggccgaacagagaagagagatcgtgctgatcgcctcaaggcggggaggtcacccgcagctgggtaaagaaaatgggaacccgggagaggggaccctacgtgggaagaatcagaggaagatgtacataagagtaagtggacaagatgtgtggatgagaagggcgcgtagtgctaaacagacaataagagaccgctcaggtgtggggtgacctaatggggagacgtggaatatgtttggtggcacggaggaaagtctaatggatatcgtgtttaggaggacgatggagtcttacgtgctcgttgatg

SEQ ID NO: 85 - DNA, 342 bp, Homo sapiens
ggcacgagctcgaaaatttaatcaagagtgcgcactcttattccctttactgagggtaatatctacacggagcctagacagccgaaccagaggcttccttttgtccaagaagaggatggaatagacaagctggagctgctggctcccggatgaatttcagacctggggttctcagctccaggcaacttggactcccaggacctcctgacggtcctgactatactgtttactacccgttccatcgacttgccatggtgactgctgcctcacgattggagcgtgaacaccttacgcatctatgacactagggatacaatggagaggtatagagcaaccctagcg

SEQ ID NO: 86 - DNA, 420 bp, Homo sapiens
cgctccgcaggtttagcaccgactgtagctctgatcagcaggaccgattaaacggaactgcccctagcggttttaaccgctcctgaccagtcccgttgccgcaccccatcttggaagtatgccctggccagtaggagccacaaagcgcgattagcctcactgcatttcaggtacaggccggcgccagccgtgcctcaccaggtccaccggctccgagcagcagcaagcccggtcggaaagcgaaagtggcctcgccatgtccagaccggccagctcccccgcctacctgaccccgccccgcagccgcacctgggtccgagtcatcgccgcggccgccacggccccgcacaggaaggcggcagcaaagagcgcacgctcgacgcgctgcagccaggacagcgccatggcgcccctcgtgcc

SEQ ID NO: 87 - DNA, 392 bp, Homo sapiens
ggcacgaggggagaaggcggggctgggcctcagcttcccaaaggtttttgaggaactgggcttttctgacaccctcaaaggtcagaaggttaaaggggcagaaggcattcggaaagctcccctcccacagtgacacctctctgacttctgacctagggttccaccaccgcttcaatcccaatgcctccagctccttcaagcccagtgggaccaagtttgccattcagtatggaactgggcgggtagatggaatcctgagtgaggacaagctgactgtgagtggcctttgactccaggaagcctcgagcctgggagaaccctgttgtctaagatcatctggcttagggaggggcttgaggtgcaggggcttcctgagccgatggatggggctt

SEQ ID NO: 88 - DNA, 332 bp, Homo sapiens
gggaggaatataatgcattacccaaatggtcatgccatatgtattgcaaatggacattgtatcatcttgtgaaatagtcataacattaaagtttgggtatagtagttagcatattttcatggccagtattgatgctattttttcccttacctatcagactctttcaaagagaaaagagggagcagttggaattttatgtttgttgttctattttgtctattatgaattgtgacaaaaccattataaaagatgacaagtgtgtgtgtttctttttttctttttaaactgtagggaacatagtcattagtgatctcaaataccgaaagacattt

SEQ ID NO: 89 - DNA, 535 bp, Homo sapiens
attaacctaggaaatacatgttatatgaacagtgttatttaagccttgtttatggccacagatttcaggagacaagtattatctttaaatctaaatgggtgcaattcattaatgaaaaaattacagcatctttttgcctttctggcccatacacagagggaagcatacgcacctcggatattctttgaggcttccagacctccatggtttactcccagatcacagcaagactgttctgaatacctcagatttctccttgacaggctccatgaagaagaaaagatcttgaaagttcaggcctcacacaagccttctgaaattctggaatgcagtgaaacttctttacaggaagtagctagtaaagcagcagtactaacagagacccctcgtacaagtgacggtgagaagactttaatagaaaaaatgtttggaggaaaactacgaactcacatacgttgtttgaactgcacgagtacctcacaaaaagtggaagcctttacagatctttcgcttgccttttggccttcctcttctg

SEQ ID NO: 90 - DNA, 432 bp, Homo sapiens
gcccgggacgacccacgcgtacgactcagtttaagtccaaactttctaataatttgatgtagcagcgtaatgggctgcattactagtgagttccttatgtgagtgtgcgagcatatgctggatgacttatctagaataatgtagaagagaattaaacattgaatgggagcttaaattagttaatttctgaggttcccttccattcttagaattctttgatttttatattgaattgagagaactagtatagtttttatttcagcaaattataacaccattgttctcaaggcatggaaaatgtgcttttcatctttaagatactaaaccttttcactcatggcaattttttttagctagcctctaagcttggaaagcagtggaccccattaataatcctggccaactctcttagtggaactaatatgggagaag

SEQ ID NO: 91 - DNA, 780 bp, Homo sapiens
  misc_feature (1)...(780): n = a,t,c or g
ccatgcataggattaaactgaatgatcgaatgacatttcccgaggaactagatatgagtacttttattgatgttgaagatgagaaatctcctcagactgaaagttgcactgacagtggagcagaaaatgaaggtagttgtcacagtgatcagatgagcaacgatttctccaatgatgatggtgttgatgaaggaatctgtcttgaaaccaatagtggaactgaaaagatctcaaaatctggacttgaaaagaattccttgatctatgaacttttctctgttatggttcattctgggagcgctgctggtggtcattattatgcatgtataaagtcattcagtgatgagcagtggtacagcttcaatgatcaacatgtcagcaggataacacaagaggacattaagaaaacacatggtggatcttcaggaagcagaggatattattctagtgctttcgcaagttccacaaatgcatatatgctgatctatagactgaaggatccagccagaaatgcaaaatttctagaagtggatgaatacccagaacatattaaaaacttggtgcagaaagagagagagttggaagaacaagaaaagagacaacgagaaattgagcgcaatacatgcaagataaaattattctgtttgcatcctacaaaacaagtaatgatggaaaantaaattgaggttcataaggataagacattaaaggaagcagtagaaatggcttataagatgatggatttagaagaggtaatacccctggattgctgtcgccttg

SEQ ID NO: 92 - DNA, 867 bp, Homo sapiens
ctcagtcatgccagtgcctgctctgtgcctgctctgggccctggcaatggtgacccggcctgcctcagcggcccccatgggcggcccagaactggcacagcatgaggagctgaccctgctcttccatgggaccctgcagctgggccaggccctcaacggtgtgtacaggaccacggagggacggctgacaaaggccaggaacagcctgggtctctatggccgcacaatagaactcctggggcaggaggtcagccggggccgggatgcagcccaggaacttcgggcaagcctgttggagactcagatggaggaggatattctgcagctgcaggcagaggccacagctgaggtgctgggggaggtggcccaggcacagaaggtgctacgggacagcgtgcagcggctagaagtccagctgaggagcgcctggctgggccctgcctaccgagaatttgaggtcttaaaggctcacgctgacaagcagagccacatcctatgggccctcacaggccacgtgcagcggcagaggcgggagatggtggcacagcagcatcggctgcgacagatccaggagagactccacacagcggcgctcccagcctgaatctgcctggatggaactgaggaccaatcatgctgcaaggaacacttccacgccccgtgaggcccctgtgcagggaggagctgcctgttcactgggatcagccagggcgccgggccccacttttgagcacagagcagagacagacgcaggcggggacaaaggcagaggatgtagccccattggggaggggtggaggaaggacatgtaccctttcatgcccacacacccctcattaaagcagagtcaaggcatctcaaaaaaaa

SEQ ID NO: 93 - DNA, 690 bp, Homo sapiens
tcggaaccgccctgaattacctctgtcgacccacgcgtccggggaaacgcttctacaggatatggaaaaatttggctcgatgatgtttcctgtgatggagatgagtcagatctctggtcatgcaggaacagtgggtggggaaataatgactgcagtcacagtgaagatgttggagtgatctgttctgatgcatcggatatggagctgaggcttgtgggtggaagcagcaggtgtgctggaaaagttgaggtgaatgtccagggtgccgtgggaattctgtgtgctaatggctggggaatgaacattgctgaagttgtttgcaggcaacttgaatgtgggtctgcaatcagggtctccagagagcctcatttcacagaaagaacattacacatcttaatgtccaattctggctgcgctggaggggaagcctctctctgggattgtatacgatgggagtggaaacagactgcgtgtcatttaaatatggaagcaagtttgatctgctcagcccacaggcagcccaggctggttggagctgatatgccctgctctggacgtgttgaagtgaaacatgcacacacatggcgctctgtctgtgattctgatttctctcttcatgctgccaatgtgctgtgcagagaattaaactgtggagatgccatatctctttctgtgggagatcactttggg

SEQ ID NO: 94 - DNA, 948 bp, Homo sapiens
cgagtggcgaggttcatcatggaggcagacggagtctcgctctgttggccaggctggagtgcaggggcgtgatctcggctcactgcaacctccgtctcccggactaaagcaattatccttcctcacgcttccgagtagctggaattacaggtgtcaagctagggatgcggtccattcccattgccactgcttgcaccatttaccataagttcttttgcgagaccaacctggacgcctatgacccttacctgattgccatgtcttcaatttacttggccggcaaagtggaagagcagcacctgcggactcgtgacatcatcaatgtgtccaacaggtactttaacccaagcggtgagcccctggaattggactcccgcttctgggaactccgggacagcatcgtgcagtgtgagcttctcatgctgagagttctgcgcttccaggtctccttccagcatccacacaagtacctgctccactacctggtttccctccagaactggctgaaccgccacagctggcagcggacccctgttgccgtcaccgcctgggccctgctgcgggacagctaccatggggcgctgtgcctccgcttccaggcccagcacatcgccgtggcggtgctctacctggccctgcaggtctacggagttgaggtgcccgccgaggtcgaggctgagaagccgttgggtggcagatttatgccatggacacagagatcccctaaggtcctggcccaggcctgcccaaagagaagccacatctgcgtttgtcctttgagaggactttgactacaatacaggcatgacatcaatgaaaggaaagtcatgaaatcgatgagactgaatccctacggatttcttaaaagccagatttgtagggagaatgaatgtgcaacgtggctgaaatctattttgtgtaataaaaggtgatacaagtcaaaaaaaa

SEQ ID NO: 95 - DNA, 541 bp, Homo sapiens
ttagtttataaagaaaagacatttaattggctcatagttctgcaggctgtacaggaagcatagtagcttctgcttctggggaggcctcaggaaacttacaatcacagcagaaggtgaaggggaagcaggcacgccgtacatggctgggctttcggcctcctcttcatcaacaaggagtcggtggtcatggcctatctcttcaccaccttcaacgccttccagggggtcttcatcttcgtctttcactgcgccttacagaagaaggtgaggtcgaggcggggtcctgggtcacagcctcccttggagacgtttcctgggtacccaggagaaggcggcgagggtggaggggactcaggggctccctcaagcccccagtgagtgctgcagggcttctgtggtcaggtctgcgtcccccgggaggggagcacgagctcagggttagggagggtttaaccacgggtgaagagggttctgttgacagacgctgaggccgcaaacgctcctcctctctcttcacactcgccaacaccgcggtggcgct

SEQ ID NO: 96 - DNA, 603 bp, Homo sapiens
cagcccgtaaggatgatctacctccaaatatgagattccatgaggagaagaggctggactttgaatggacactgaaggcagggtgagaaaaaggctagccctcgaagtgaaataagggctgggagggccaagaatgatgatagacggtgagggactgagggatcagctgatgagttaagcctcaacacctgtcctagggctttgcagatggccctcaaacgtgtttacaccctcctgagctcctggaactgcctagaagactttgatcagatcttctggggccagaagagtgccctggctggtcagtggttccccgaggtctccataatcccttaatggcccctctggatgactcatcacactccacagtcccccgtaactctttgcaagaagagaccttatcatatctggtcaactcagagaggccttgagaatgaaaacgcagaagctgggttcagggagggttatatacctgaacccctggggtagattttggagaagggatatgcaggctgtggtacatatatcctcctttcaccgcccaccaaagagaacgttcgccagtgctggcaggatgatgagttgttcagcttccctcgtgcc

SEQ ID NO: 97 - DNA, 1385 bp, Homo sapiens
tctttcagcaaggtgggggcaagcagaatgcctcccaggatttcacacctgagccctgccccaccctgctgagaaaacactccgccacgtgaagagacagaggaggatggcaggagttacctcgggaaacaaacaggatcttctctgccctgctccagtcgagttggcctgacccgcttggatcagtgaccatttgctggcagacaggggagagcagcttccagcctgggtcagaaggggtgggcgagcccctcggcccctcaccctccaggctgctgtgagagtgtcaagtgtgtaagggcccaaactcaggttcagtgcagaaccaggtcagcaggtatgcccgcccgtacgttaagggggccctctaaaccccttgcctggcctcacctggccagctcaccccttttgggtgtaggggaaaagaatgcctgaccctgggaaggctccctggtagaatacaccacacttttcaggttgttgcaacacaggtcctgagttgacctctggttcagccaaggaccaaagaaggtgtgtaagtgaagtggttctcagtccccagacatgtgcccctttgctgctggctaccactcttccccagagcagcaggccccgagccccttcaggcccagcactgccccagactcgctggcactcagttccctcatctgtaaaggtgaagggtgatgcaggatatgcctgacaggaacagtctgtggatggacatgatcagtgctaaggaaagcagcagagagagacgctccggcgccccagccccactatcagtgtccagcgtgctggttccccagagcacagctcagcatcacactgacactcaccctgccctgcccctggccagagggtactgccgacggcactttgcactctgatgacctcaaagcactttcatggctgccctctggcagggcagggcagggcagtgacactgtaggagcatagcaagccaggagatggggtgaagggacacagtcttgagctgtccacatgcatgtgactcctcaaacctcttccagatttctctaagaatagcacccccttccccattgccccagcttagcctcttctcccaggggagctactcaggactcacgtagcattaaatcagctgtgaatcgtcagggggtgtctgctagcctcaacctcctggggcaggggacgccgagactccgtgggagaagctcattcccacatcttgccaagacagcctttgtccagctgtccacattgagtcagactgctcccggggagagagccccggcccccagcacataaagaactgcagccttggtactgcagagtctgggttgtagagaactctttgtaagcaataaagtttggggtgatgacaaatgttaaaaaaaaaa

SEQ ID NO: 98 - DNA, 2191 bp, Homo sapiens
accaccacccgtgcggggggatatctgagccatttctctgtgggcttttgtttttcaaagactgggcaggttgttgttgaggtgtgtgtgggctgccacgattttgtggaagtataatactttgtcattatgagatgtcgtctctcggtgcctcctttgtgcaaattaaatttgatgacttgcagttttttgaaaactgcggtggaggaagttttgggagtgtttatcgagccaaatggatatcacaggacaaggaggtggctgtaaagaagctcctcaaaatagagaaagaggcagaaatactcagtgtcctcagtcacagaaacatcatccagttttatggagtaattcttgaacctcccaactatggcattgtcacagaatatgcttctctgggatcactctatgattacattaacagtaacagaagtgaggagatggatatggatcacattatgacctgggccactgatgtagccaaaggaatgcattatttacatatggaggctcctgtcaaggtgattcacagagacctcaagtcaagaaacgttgttatagctgctgatggagtattgaagatctgtgactttggtgcctctcggttccataaccatacaacacacatgtccttggttggaactttcccatggatggctccagaagttatccagagtctccctgtgtcagaaacttgtgacacatattcctatggtgtggttctctgggagatgctaacaagggaggtcccctttaaaggtttggaaggattacaagtagcttggcttgtagtggaaaaaaacgagagattaaccattccaagcagttgccccagaagttttgctgaactgttacatcagtgttgggaagctgatgccaagaaacggccatcattcaagcaaatcatttcaatcctggagtccatgtcaaatgacacgagccttcctgacaagtgtaactcattcctacacaacaaggcggagtggaggtgcgaaattgaggcaactcttgagaggctaaagaaactagagcgtgatctcagctttaaggagcaggagcttaaagaacgagaaagacgtttaaagatgtgggagcaaaagctgacagagcagtccaacaccccgcttctcttgcctcttgctgcaagaatgtctgaggagtcttactttgaatctaaaacagaggagtcaaacagtgcagagatgtcatgtcagatcacagcaacaagtaacggggagggccatggcatgaacccaagtctgcaggccatgatgctgatgggctttggggatatcttctcaatgaacaaagcaggagctgtgatgcattctgggatgcagataaacatgcaagccaagcagaattcttccaaaaccacatctaagagaagggggaagaaagtcaacatggctctggggttcagtgattttgacttgtcagaaggtgacgatgatgatgatgatgacggtgaggaggagtataatgacatggataatagtgaatgaaagcagaaagcaaagtaataaaatcacaaatgtttggaaaacacaaaagtaacttgtttatctcagtctgtacaaaaacagtaaggaggcagaaagccaagcactgcatttttaggccaatcacatttacatgaccgtaatttcttatcaattctacttttatttttgcttacagaaaaacggggggagaattaagccaaagaagtatatttatgaatcagcaaatgtggtgcctgattatagaaatttgtgatcctatatacaatataggacttttaaagttgtgacattctggctttttcttttaatgaatactttttagtttgtatttgactttatttcctttattcaaatcatttttaaaaacttacattttgaacaaacactcttaactcctaattgttctttgacacgtagtaattctgtgacatactttttttttcttatagcaatacactgtaatatcagaaatggttggcctgagcaacctagtaagacctcgtctctactaataattaaaaaactagctggcatggtagcacacacctgtagtcccagatacttgggaggccaaggcaggaggattgcttgagacctagcaatcagtcagggctgcagtgagccatgatggcaccactgcactctagcctgggcaagagaacaagatcctgtctcaaaaaacagggaaa

SEQ ID NO: 99 - DNA, 335 bp, Homo sapiens
  misc_feature (1)...(335): n = a,t,c or g
ggcacgaggctgaacttcaggtggatgatgagacaaaatagaccgataggaatcgtctggctatatactccttgttgccactgctgagtgactagactggcccagagatccgcggtgcacatgctggccgctcctccctcagaaaaaggcaatggcctaaatactgtttaaatgacctgactcgatgctgtgggaaactggctgctctgctgcatgccgtgtgactgtcagtccaaccgttacatttgccacgttctccacacgggggatagacgcaatgcgcccaggtcccagttttctttggaggcagcagctctcgcagggctgaatgttgn

SEQ ID NO: 100 - DNA, 348 bp, Homo sapiens
cctactctgggggatcaaccagatcttcattccataactcgtgcttctcgtcctaaattatgtactagaaaaaattgtaatcctcttactataactgtccatgaccctaattcaactcagtagtattatggcatgtcatgggaattaagattttatatcccaggatttgatgttgggactatgttcaccatccaaaaaatcctggtctcatggagcccacccaagccaatcgggcctttaactgatctaggtgaccctatgttccagaaaccccctaacaaagttgatttaactgttcctccaccattcttagtcataaaagatacactccaaaagttcgagaaaatc

SEQ ID NO: 101 - DNA, 416 bp, Homo sapiens
agcctcaataatgtaacactgccccaagcgaaaacagaaaaagatttcatccaactctgcacccctggggtaattaagcaagagaaactgggcacagtttactgtcaggcaagctctcctggagcaaatatgattggtaataaaatgtctgccatttctgttcacggtgtgagtacctctggaggacagatgtaccactatgacatgaatacagcatccctttctcaacagtaggatcagaagcctatttttaatgtcatcccaccaattcccgttggttctgaaaattggaataggtgtcaaggatctggagatgacaacttgacttccttggggactctgaatttccctggtcgaacggtttctttttcttttgagatggagtctcgctctgtcgcccaggctggagtgcagtg

SEQ ID NO: 102 - DNA, 352 bp, Homo sapiens
acgcgtccgacaaaaacaacaacagatggggaaactgaaagtgcatagcacaaaatgcggactaattctgaaatcaccaatatgtatctgtgcttgggaaatagaggcatacacaggaatgcagatgcccacacactcacattcacactcacactcactctcacactcactctcacactcactctcactcgcactctcacactacaccgagatgctcacacactcagcctccccatgcccaggcccctgctctttgttaatcataagaagaccgtggacaacccacctggaaactatgtgcccacagacccagactgaaggtgataaaagagggtggctggcttgggggctg

SEQ ID NO: 103 - DNA, 702 bp, Homo sapiens
aaagcaggtgcctggaaaagcctgctgagggtgaaggggaaccatccagtgtcctgggttggggaagcattttcctctttatgagtctgtctctggtcctcatggaacaaaagtgggcagtggtggtatgagaagcagaggctaattgtctaccccctgcctccaagtagaattactccttgtctgtgtacctggtgaggcagttgactgcaggaacccttctacaaaaactcagagcaaagggtatccggaacccagaccactcgcgggcactgagtgagtaacatctttcctctcttccccacctgatctggattcaagtcttcctggccctccagccttcataattaaacccatacctcttttttgacaacttactccccttctcacatgaaccccaaccctccccctctacccctgaccagtcttccagtctttatagttgaagttggaccactcccaggcacccttgaatttccaatcatgtatctgctttgcacctcacagtccctaactccagccctgctagaatatgggctctccggactggaaagaatcttaggggtcctctaatctaaccctcacatgatgcttcaactcctccagatcatctctaacatagccagagtgtcacgctatgtttaagcatcttcagggatgggaaaatcccccacacccatgtattgcggccgctctagagga

SEQ ID NO: 104 - DNA, 689 bp, Homo sapiens
ggcaacatacattgtggactttggcttcagtacaacattcagagaggggcagatgctgacagctttttgtggcatgtacccctacgtggccccagaacgctccctgggccaggcatgccagtgacccgccagggacatacaaagcctcagtgtcatactgtatttcaggaatacagtaggtagaagggccaggactttgcccttttactcagggaagcctccaaacttcaagaaaaaattctcacaggaagatatcatgccccaccacttcttgcccttcaacttgactcattaaaaaattactaatgctgaacgccaggaagtgtccttcactgtaactgatgaaaaatccatgggtgaaaagtagccagaagatgccactgataccatacgaagagccactcctggaccaccccaaacaatccagctcatggtggccatgggatttcaggccaagaacatctctgtggcaatcatagaaagaaaattcaactatcccatggccacctacctcattttagagcacacaaaacaagagaggaagtgctccaccatcagagaactgtcccttcctcccggggttcccacctctccttccccatccactgaactttccaccttccctctctcactgatgcgggctcatagggagccagcttttaacgttcagcctcccgaagaaagccagg

SEQ ID NO: 105 - DNA, 776 bp, Homo sapiens
agcaaagcaggagctggccaagctgatgcggattgaggacccctccctcctgaacagcagagtcttgctgcaccacgccaaagctggcaccatcattgcccgccagggagaccaggacgtgagcctgcacttcgtgctctggggctgcctgcacgtgtaccagcgcatgatcgacaaggcggaggacgtgtgcctgttcgtagcgcagcccggggaactggtggggcagctggcggtgctcactggcgaacctctcatcttcacactgcgagcccaacgcgactgcaccttcctgcggatctccaagtccgacttctatgagatcatgcgcgcacagcccagtgtggtgctgagtgcggcgcacacggtggcagccaggatgtcgcccttcgtgcgccagatggacttcgccatcgactggactgcagtggaggcgggacgcgcgctgtacaggtgcagctcccaccgcgctgctcaggcccggcctaggggtggggacctgggggtggtcagaccttgctgacctccacgcccactcaggcagggcgaccgctccgactgcacttacatcgtgctcaatgggcggctgcgtagcgtgatccagcgaggcagtggcaagaaggagctggtgggcgagtacggccgcggcgacctcatcggcgtggtgagcgcgacccccacccactgacctctggccttttccaggccagtccctcggcaactcacacgcatcatcccgggtaatccagggagtggtgaagtttttcccggggctc

SEQ ID NO: 106 - DNA, 707 bp, Homo sapiens
cccacgcgtccggatggaccccaggaaccacccagaccttaggacaggggacagcatgggacacagttgcttccactccaggaaccagcgagactacagcttcagctgagggaagacgaaccccaggagcaaccaggccagcagctccagggacaggcagctgggcagagggttctgtcaaagcacctgctccgattccagagagtccaccttcaaagagcagaagcatgtccaatacaacagaaggtgtttgggagggcaccagaagctcggtgacaaacagggctagagccagcaaggacaggagggagatgacaactaccaaggctgataggccaagggaggacatagagggggtcaggatagctcttgatgcagccaaaaaggtcctaggaaccattgggccaccagctctggtctcagaaactttggcctgggaaatcctcccacaagcaacgccagtttctaagcaacaatctcagggttccattggagaaacaactccagctgcaggcatgtggaccttgggaactccagctgcagatgtgtggatcttgggaactccagctgcagatgtgtggaccagcatggaggcagcatctggggaaggaagcgctgcaggggacctagatgctgccactggagacagaggtccccaagcaacactgagccagaccccggcagtatgaccctggggaccccctggg

SEQ ID NO: 107 - DNA, 485 bp, Homo sapiens
  misc_feature (1)...(485): n = a,t,c or g
ccgctggaacatcaggtactggggacactggccctggtaacacagcagtctcaggcacacctgtggtatcacctggagcaactcctggagctccaggtagcagcacccctggggaagcagacattggaaacaccagttttggaaaatcagggaccccaacagtatctgctgcctcaactaccagtagccctgtgagtaaacacaccgatgcagcctcagccacagcagtgacaatctctggaagcaaaccaggtacacctggaacaccaggtggtgcaactagtggaggcaaaattacacctggaattgcatgacccaccctggaccaaaagagcccctgcttctccgggtatggaggttatttccctgtaaatcctcaccagaacccatgtgctgattccctgtaatcttcccacaataaatttttagcagctctgnnnnnnnnnnnnnnggggcgcccgttttaagggacccacctttactcg

SEQ ID NO: 108 - DNA, 565 bp, Homo sapiens
cgggctcaccgctgctgtctcccgctcccaagtctttcttgtgaaatccaaattggattctcttgatcttccatctttccagggcagtgagcttgtccttgttcctgctgcagaagttgtagaaggaactggcctcagagcccacgctgtcctcatcatcctcccgcaccctgctccctgcttctgagctcctgtctgccgcctcctctctcttgctcttggcgtggtacctccgggaagcctccttctcaatctccagcagcctctcgttccatgcgtcccaggtgctctccgaggacatcgagtctgcgcggcgcctcctgccgtggtccgggcggttcagctccagctgctgcttcaggacccagatgtcgtggctgctcacgctctcccaggcgctgctctcgctcagggtgcgccgccgcctccccaccgaggagccagcgtcgctctcctcctctttctcctcctcccttccccacctccggtacccttctgctaaaaacctctcgtttcggctctgccactcgtgaatgatcctctccacgtcctcgtcctcgacccg

SEQ ID NO: 109 - DNA, 986 bp, Homo sapiens
ggatgacgtgccgcccccggctcctgacctctacgacgtgccccctggcttgcggcggcctggcccgggcaccctgtacgatgtgccccgtgaacgggtgcttcctcctgaggtggctgatggtggcgtggtcgacagtggtgtgtatgcggtgcctcccccagctgaacgtgaagccccggcagagggcaagcgcctgtcggcctccagcaccggcagcacacgcagcagccagtctgcgtcctccttggaggtggcagggccgggccgggaacccctggagctggaagttgctgtggaggccctggcacggctgcagcagggtgtgagcgccaccgttgcccaccttctggacctggcaggcagcgccggtgcgactgggagctggcgtagcccctctgagccacaggagccgctggtgcaggacctgcaggctgctgtggccgccgtccagagtgccgtccacgagctgttggagtttgcccgcagcgcggtgggcaatgctgcccacacatctgaccgtgccctgcatgccaagcttagccggcagctgcagaagatggaggacgtgcaccagacgctggtggcacatggtcaggccctcgacgctggccggggaggctctggagccacccttgaggacctggaccggctggtggcctgctcgcgggctgtgcccgaggacgccaagcagctggcctccttcctgcacggcaatgcctcactgctcttcagacggaccaaggccactgccccggggcctgaggggggtggcaccctgcaccccaaccccactgacaagaccagcagcatccagtcacgacccctgccctcaccccctaagttcacctcccaggactcgccagatgggcagtacgagaacagcgaggggggctggatggaggactatgactacgtccaccttacagggggaaggaggagtttttagaagacccagaaggagcttctgggaaaaagggcagcat

SEQ ID NO: 110 - DNA, 414 bp, Homo sapiens
cgaagggaaagcagcaggttggggcttcttgtggccaacttcagagcctgtcaccaggaaaggtaagcatgggaggaaggaagatggcgacagatgaagaaaatgtctatggtttagaagagaacgctcagtcccggcaggagtccacgcggaggctcatccttgttgggagaacaggggccgggaagagcgccactgggaacagcatcctgggccagagacggttcttctccaggctgggggccacgtctgtgaccagggcctgcaccacgggcagccgcaggtgggacaagtgccacgtggaagtcgtggacactccggacattttcagctcccaagtgtccaagacagatcctggctgtgaggagagaggtcactgctacctgctctcggcccccggaccccacgcgctgg

SEQ ID NO: 111 - DNA, 419 bp, Homo sapiens
  misc_feature (1)...(419): n = a,t,c or g
gactctcgggttacgttcactaacgaaggagggcggtggtgggggtgatgtggcggcctttgaggttggcacaggggctgcggccagccgggcgctggggcagtgcgggcagctccagaagctcatcgtcatcttcattggcagcctgtgcgggctgtgcaccaagtgcgctgtgtccaacgacctcacccagcaggagatacagaccccggagatacaacagagaaatgcataatgtccagtcaatttattaaagttccaaagtnnnnnnnnnnnnnnnnnnnnnnnnnnnnnnnnnnnnnnnnnnnnnnnnnnnnnnnnnnnnnnnnnnnnatttcaatatgattaaagcaggagtgaggacacagcgaaagtgagacaaggaaaagagaacaaaataaaacaggagagacagaata

SEQ ID NO: 112 - DNA, 1191 bp, Homo sapiens
gtgcaaggtgctgtcactcacgtgtgccctcgaccctcccgttcacccgcagccttctcagcgcctctccctgggccggaggcctcctcaccagcctacctgttgctctggaaaaaaatcccgtcccccgactccgtccctacccccagtcttcggccggctctggcccctggggagggggctgcacggtggaaggaggctggctatgggcccggctgcccgctgcatgtacctcctcctccacccatcgcctcttgcctgggggtaactttgcctggggctcattctttggttaagctgaagctgccgtgggtggccaaaccgcagattctttgcaaattctgagctggcagagctcgcagccgggagccggccggggaagaggagacttgcgcgccgcaagccgcctgcctccaccctgctctccatctcccgctctagaagggctgggaagctcgcggccggggttccacctggaagctgcttgcatggctgaacccagcttaggtccctgacggggctgctggtggaattctcccccttcgaagctggggaggtttaggagggggaaggcttctgtgaagctctcaaaccactaatagagccccctccccaacagtgacggcgcagatgctcccccttttcttagttgacaccaccaggcagcttcctggccgttggtaggttcctgcagctggctgagggaacagggaccggcaggggactttgttaggggagggttgggatgggcagtgggcccctgaaagttaatatattggaacctagctcgagtgtcgttctttccaattccgaaagtagaaagagtaaaaataggggtgattggggtggggttagtagaatgcctctctcagggcgctcccccctcccccaccgttttagagagctaggcctcagccagtcttgccactcccatctcagtgcttcctgaagaggctgttttgagtgttgatgaaaagcaatgcaattatgccaaacagtattgagcagaataatttatttcttttttttcttttgctttaaatcatgaatcccgccaggtacggtggctcacgcctgtcatcccagcactttgggaggccaaggcgggcggattacttaatacttaaggtcaggagttcgagaccagcctggccgatatggtgaaacctcgtctctaccaaaaaaaaaaaa

SEQ ID NO: 113 - DNA, 1240 bp, Homo sapiens
  misc_feature (1)...(1240): n = a,t,c or g
agaacacgaactagtgtctctaagccactataatagttgcacatacaacatgagtgtggtgtggtaggatgcttttccttttaggtctttactgaactttcaagggattaaaaccaatgtatgtcaactttatagcaaaagattcagattctaatcctgaataccaatgcattttagagggggaaaaaatgagggatgtaaaatatatatagtagggtaagagttttgcctttgaacaatgtgcatattctattttaatttggaatgttttatacttgcatttcatgttatgtagtttttggactggactgtgtttttccacaaaatgaaaaatcaactattttgccaccttattattcaacctacctgcccatagttgtctatgccagttactaatctatttaaatttaataaatcaaaagctgtccttagggattggccaagagtcgtaagtccttcagcctgaaggtttttcaattcattcataaacgttgcatggttttctttccatccagccttgatagcatagggcggctcttcgaaagtgaccagcatatacctgtctcctctgctggcagggtcccgggcacggagcttcatgaaggtctctaccgcgcctttggccgtgtccaggtaggtggtgcccagatggctgcgctggttcatagaggcagacgtgtctatcaggaacagtaagatgggcatagtgctggccggggacaccggggcccgaggtggtggagaaagaggagatggtagaggtggaggcgccggtggcggcgaccgccgctagcggggcgggggagcacggcccccgggaggaaaacactgtctgggtctttcctccggctgcggggaattcctcccccgatagttgagaggaaactccccagacccagtgctccccgtcgtaccnccgcctccgcctcctcctgcctgcctgcccgctggggcgggcgcccagccgtctgtctgtcggttcgtcccccccgcctcgggggtcccgtccccgctcccggcccctgtgtgtgtcccagcgggagacgggcctggctccccaccccacccccggtacaggagtggggacctgggagctggcgaagaggggagtgggctgagggaagattggccctggggctgttgggagaagtttcagggactccctccgcacaccggcggtgtcaccactttctcagcccctctcgcggacgcgtgggtcgcgccggggtttccgcaggca

SEQ ID NO: 114 - DNA, 810 bp, Homo sapiens
aatagaattccgtcggcacacgcacgcgtacctaggatcgtatagagcggccgcaatacatgccgtcttcttaaatcaactcctctctctcaaaaagcctttctttccgtgtcgcgaatatcatccctccggtcctgtcccgcagcgagttccccggcgttgggcttctctattatgccggccagcggagtccaattggtctgacttcactgtccggagaatcctctcgctcccaaacctccctgagagacgacctttaaccgtgccagccggacctgcctacaaagaccctcctcttcaacctgtcccctgtgttactccacaaaacggacacagaagttcgtcaacctgcccagataccacgcctcaaagcggcaacagagccgaacccctttctcaggcttcggacggcccagacccggcatctcttttctcctcttccccagacccttccacctctggcctccgagagccccagcctcagttcccctccaggccctaggaaccctactctccagcagtacagtctgtagacccccgaatcagttccccactcaacctcagaactcctctggcgccgactggccccactcgggcaaaggatggcggtggataggatgacccgaaccaccagagccagcaaacttaccccagccgccatggtgattccgcaaagaaagggggtggggttctcggcgctgccgcaaagtaagcccgcccgggagagaagggagggggaaagaggagagccgtggagaaacagcagccgaaaaacgaggacgaaacagaagacatacgtacgacagttcg

SEQ ID NO: 115 - DNA, 320 bp, Homo sapiens
caagagcacgatgctgaagcactggagagtggggctctggggtcagtgctggatcagaggcaagaggaggtgatgatgcggccctgtcctgagtgacaccaacccctccccagtactacacctgcagctgtgtcctgggcttcattgcctgctccatcttcttgcagatgagcctgaagccaaaggtcatgctgctgacagtggccctggtggcctgtctcgtgctcttcaacctctcccagtgctggcagcgggactgctgcagccaaggcctgggcaacctcactgagcccagtggcaccaacaggtagggccccgcc

SEQ ID NO: 116 - DNA, 456 bp, Homo sapiens
ggcaaggcaggcggcgcggccggcctcttcgccaagcaggtgcagaagaagtttagcagggcccaggagaagtagacaaggcggtttgggaagacatgtcagccagaagaaagagcgagggaagaaagacaagaaggacctgagatagagtttgggttttcctttttttctctctctctttattaagcccaacctgccttctacaacggagaagttttggttttctaagagctgatggacttagaagcatttggatgaacagctctgcttaccaactgaaatatccctattatcttctaaaagtggagcactgctttgagccctgggaaggcttaaaggcaaccagctctcccgagttgatttatcagcagaaaactgatggaatgtagatgtagctcctgactttaagagaccacaatggaagggaggttattttctatcatttgaggtcatgtg

SEQ ID NO: 117 - DNA, 2398 bp, Homo sapiens
cccacgcgtccggtcagcctcagtcttcaatgagggaccccgtacagagtaacccaaacgcttgttcctatttcaggatgtgaacactctgcaaggaggtgggcagcctgtggtgactccgtccgtccagccctctcttcagccggcccatccagcgttaccacagatgacctcacaggcacctcagccatctgttactgggctccaggcaccttctgctgccttaatgcaagtgtcatctctcgattcccactcagctgtatctggaaatgcccaatcctttcagccctatgcaggtatgcaagcctacgcttatccccaggcatctgccgtcacctcccagctgcagcccgttcggcctttgtacccagcaccgctctctcagcctccccatttccaaggatcaggtgatatggcttcatttctcatgactgaagcccggcaacataacactgaaattcgaatggcagtcagcaaagtggctgataaaatggatcatctcatgactaaggttgaagagttacagaaacatagtgctggcaattccatgcttattcctagcatgtcagttacaatggaaacaagcatgattatgagcaacatccagcgaatcattcaggaaaatgaaagattgaagcaagagatccttgaaaagagcaatcggatagaagaacagaatgacaagattagtgaactaattgaacgaaatcagaggtatgttgagcagagtaacctgatgatggagaagaggaacaactcacttcagacagccacagaaaacacacaggcaagagtattgcatgctgaacaagagaaggccaaggtgacagaggagttagcagcggccactgcacaggtctctcatctgcagctgaaaatgactgctcaccaaaaaaaggaaacagagctgcagatgcagctgacagaaagcctgaaggagacagatcttctcaggggccagctcaccaaagtgcaggcaaagctctcagagctccaagaaacctctgagcaagcacagtccaaattcaaaagtgaaaagcagaaccggaaacaactggaactcaaggtgacatccctggaggaggaactgactgaccttcgagttgagaaggagtccttggaaaagaacctctcagaaaggaaaaagaagtcagctcaagagcgttctcaggccgaggaggagatagatgaaattcgcaagtcataccaggaggaattggacaaacttcgacagctcttgaaaaagactcgagtgtccacagaccaagcagctgcagagcagctgtctttagtacaggctgagctacagacccagtgggaagcaaaatgtgaacatttgttggcctccgccaaggatgagcacctgcagcagtaccaggaggtgtgcgcacagagagatgcctaccagcagaagctggtacaacttcaggaaaagtctgtttgttttgcagtgtttagccctccaggcccaaatcacagctctcaccaagcaaaatgaacagcacatcaaggaactagagaagaacaagtcccagatgtctggggttgaagctgctgcatctgacccctcagagaaggtcaagaagatcatgaaccaggtgttccagtccttacggagagagtttgagctggaggaatcttacaatggcaggaccattctgggaaccatcatgaatacgatcaagatggtgactcttcagctgttaaaccaacaggagcaagagaaggaagagagcagcagtgaagaagaagaagaaaaagcagaagagcggccacgaagaccttcccaggagcagtcagcctcagccagttctgggcagcctcaagcacccctgaatagggagaggccagagtcccccatggtgccctcagagcaggtggtcgaggaagctgtcccgttgcctcctcaggccctcaccacttcccaggatggacacagaaggaaaggggactcagaagctgaggcactctcagagataaaagatggttcccttccacccgaactgtcttgcatcccatcccacagagttctagggcccccgacttcaattccacctgagcccctaggccctgtatccatggactctgagtgtgaggagtcacttgctgccagcccaatggcagctaaagcccgacaacccatcagggaaaggtctgtgttcaggggaagtaggcaccagatgggcccacttacaaggaaaggttccacaagattgttccctggatttcaggaccccgagggagggggacccactggccttagggcttgaaaagcccagggagagcctcagcctccacagcttcaaggaaaggttgatgttcactaggttccaccggttccccacaagggagcttttcaagaacaggagggcaggtttccacagttttgcagggagca

SEQ ID NO: 118 - DNA, 800 bp, Homo sapiens
agcgaaacggcgcagcaaattatcgaccgtctgcgcgtaaaactggcgaaagaaccgggggcgaatctgttcctgatggcggtacaggatattcgcgttggtgggcgtcagtcgaacgccagctaccagtacacgttgttatccgacgacctggcggcactgcgagaatgggagccgaaaatccgcaaaaaactggcgacgttgccggaactggcggacgtgaactccgatcagcaggataacggcgcggagatgaatctggtttacgaccgcgacaccatggcacggctgggaatcgacgtacaagccgccaacagtctgttaaataacgccttcggtcagcggcaaatctcgaccatttaccagccgatgaaccagtataaagtggtgatggaagtggatccgcgctatacccaggacatcagtgcgctggaaaaaatgttcgttatcaataacgaaggcaaagcgatcccgctgtcatatttcgctaaatggcaaccggcgaatgccccactatcggtgaatcatcagggattatcggcggccttgaccatttcgtttaacctgccgaccggaaaatcgctctcggacgccagtgcggcgatcgatcgcgcaatgagccagcttggtgtgccttcgacggtgcgcggcagttttgccggcccggcgcaggtgttccaggagaccatgaactcgcaggtgatcctgattattgccgccatcgccacggtgtatatcgtgctgggaatcccttacgagaggtacgtacatccgccgacgattctcttgtgaaggccgcc

SEQ ID NO: 119 - DNA, 427 bp, Homo sapiens
aaatcatcacacctgatgcgatgggttgccagaaagatattgcagagaagatacaaaaacagggaggtgattatttattcgctgtaaaaggaaaccaggggcggcttaataaagcctttgaggaaaaatttccgctgaaagaattaaataatccagagcatgacagttacgcaatcagtgaaaagagtcacggcagagaagaaatccgtcttcatattgtttgcgatgtccctgatgaacttattgatttcacgtttgaatggaaagggctgaagaaattatgcgtggcagtctcctttcggtccataatagcagaacaaaagaaagagccagaaatgacggtcagatacaatatcagttagttgggtatcgccggggatatatcagtcacagcgatctccgggacggacgattgaatctcgtaatc

SEQ ID NO: 120 - DNA, 378 bp, Homo sapiens
ccattatttgaaaatgctcactcaggcgcggcgggaagtgattatcgccaacgcctacttcttccccggctatcgatttttacacgccttgcgtaaagcggcacggcgcggggtgcggatcaaactgatcattcagggcgaaccggatatgccgattgtcagagtcggtgcgcgcttgctgtataactatctggttaaaggcggcgttcaggtttttgagtaccgccgccgcccgctccacggcaaagtggcattgatggacgatcactgggcgacagtagggtccagtaatctccatccggtcagttagtcggggaatctccaagcaaatgtcatcctccacgttctacgggtaccgacattgaatccgtaatcatg

SEQ ID NO: 121 - DNA, 508 bp, Homo sapiens
ctgccgcctggtgaagtttacgccccatcgaagccctggcaaaagaagtccgtgaactgaaataacatactcgttaattgctcaatccagccacaacgcgagaactgaccagtctgggacgaaacctgaaccgattgttaaaaagtgaacgcgaacgttacgacaaataccgtacgacgctcaccgacctgacccatagtctgaaaacgccactggcggtgctgcaaagtacgctgcgttctctgcgtagtgaaaagatgagcgtcagtgatgctgagccggtaatgctggagcaaatcagccgcatttcacagcaaattggctactacctgcatcgtgccagtatgcgcggcgggacattgctcagccgcgagctgcatccggtcgccccactgctggacaatctcacctcagcgctgatcaaaggcaagccgcgtaaagggggcaacgtcactgtttttccattcacagcgatgtacagggacggacattgaatccgtgatcagtg

SEQ ID NO: 122 - DNA, 724 bp, Homo sapiens
gggtaacactgtgatgtttcagcacctgatgcagaagcggaagcacacccagtggacgtatggaccactgacctcgactctctatgacctcacagagatcgactcctcaggggatgagcagtccctgctggaacttatcatcaccaccaagaagcgggaggctcgccagatcctggaccagacgccggtgaaggagctggtgagcctcaagtggaagcggtacgggcggccgtacttctgcatgctgggtgccatatatctgctgtacatcatctgcttcaccatgtgctgcatctaccgccccctcaagcccaggaccaataaccgcacgagcccccgggacaacaccctcttacagcagaagctacttcaggaagcctacatgacccctaaggacgatatccggctggtcggggagctggtgactgtcattggggctatcatcatcctgctggtagaggttccagacatcttcagaatgggggtcactcgcttctttggacagaccatccttgggggcccattccatgtcctcatcatcacctatgccttcatggtgctggtgaccatggtgatgcggctcatcagtgccagcggggaggtggtacccatgtcctttgcactcgtgctgggctggtgcaacgtcatgtacttcgcccgaggattccagatgctaggccccttcaccatcatgattcagaagatgatttttggcgacctgatg

SEQ ID NO: 123 - DNA, 435 bp, Homo sapiens
gagaaagcagcagctgccaacatagatgaagtgcagaagtcagatgtatcctctacagggcagggtgtcatcgacaaggatgcgctggggcctatgatgcttgaggtagcacatcttcattttagtgctgtattttaaaatcttgttgatcttcacattattacatttaatttcaggtgaatataatttaaggagaatccacactagtactagtactatggacctcttgagcttgctgatatgcctgtgtgtctctatgtatgttttggctcctgctgccagtatatgtgtgtttgaaattaacatagaattaaattaactagattagagtagacattggcaagttgtaattgccagttgagcatttatttgaaaaactgtattcacaagtcctactaaattctgtgttgattttagcttgaaatgttctcaaaa

SEQ ID NO: 124 - DNA, 363 bp, Homo sapiens
actggaagtgccttcagaggtcacccctttgggctttgccatgcaggctacaaagactctcctcctcagaacatgctgcttgcaggaattcaacatcatggaaaagaataaaggatgggctctcctgggaggaaaagatggccatcttcagggactatttctccttgccaacgcattgctggaaagaaatcagctccttgcacagaaggtcatgtacttattagtccctcttcttaaccgagggaatgataaacataaactcacatctgcaggcttttttgtggagcttctccggagtccagtggccaagagactgcccagcatatactctgttgcccgctttaaagactggctacaagatgg

SEQ ID NO: 125 - DNA, 373 bp, Homo sapiens
agaccggcccccgctccctcagctgcgccggaggaggcgcccagtcctcggggtgaagggtcgggggatggcgaagcgaagagtgcccgctccggtgtgggggggagcaggaggagggacgaagtccgcccgccgcgccgccgccgcgcctgacaccgagcggagcgaggaaggaggacgagcggtgaaggaagcctacccttccagccgtcagccgccgccgccgtcgccgtgacccctgcgttgcgcccggcgctgccacccgaacttagccccctcgatgccaatttcaaatagggaaggaaaagggaaaagaagggaagagaaaatccggccgctgagtcccgcgtccactcacacctccgctcgtgcc

SEQ ID NO: 126 - DNA, 362 bp, Homo sapiens
gcctacagggggtccatggcagcagttctactttctgcagctccctaagcagtgactttgaccccctagagtactgcagccctaaaggggatccccagcgagtggacatgcagcctagtgtgacctctcggcctcgttccttggactcggaggtgcccacaggggaaacccaggtttccagccatgtccactaccaccgccaccggcaccaccactacaaaaagcggttccagaggcatggcaggaagcctggcccagaaaccggagtcccccagtccaggcctcctattcctcggacacagccccagccagagccaccttctcctgatcagcaagtcaccagatccaactcagcagcccct

SEQ ID NO: 127 - DNA, 351 bp, Homo sapiens
catggctgaccccgacccccggtaccctcgctcctcgatcgaggacgacttcaactatggcagcagcgaggcctccgacaccgtgcacattcgaatggcctttctgagaagagtctacagcattctatctctgcaggatctcttagctactgtgacttcgacagataatttagcctttgaggatggacggactgactggctgcaaaggcctgactgtgtctccttcaaaattcatgtgctgccaatgtgacggtattaagaggaggggccttagagggggattagatcctgaaaggtccttactttttggagtgacgaggatgcatacgatgaaagcatctcgtagatacg

SEQ ID NO: 128 - DNA, 374 bp, Homo sapiens
gaactccccaaaggcaccatccaggtttttaccccgcttgtcaaattcccctctggcccagggctggctgctcagcaggagtgtttaataagcacttaattgcccggtgagtacagaccattccagctcaccttaactgtttcctggctgactcgcctctcggcctgattgccctgctcatctggctgagtgagctggaatgagtgtagtggtagtgccacctataggttcctcttaccttggtcttatttcacaggagcacttcccgaacgagtttacctcgggagatggaaagaaagctcaccaggactttggctacttttatggctcgagctatgtggcagcctctgacagcagccggactcctgggctgt

SEQ ID NO: 129 - DNA, 392 bp, Homo sapiens
taccaccacgcccagccccaacatatgactttctgtgtgttttccaagagtctagtgtgaggtcagaggtcagacaggtcatcaggaattttgcttcaagtgagttgctgctgccctgactcttttcccccagcaattaagtccccccggggcttgggggttgggtttgtcagcttgcttttgctgtgctgagggcttctccagactgaatcagcaggtcctcagctcatctctgctccttctctctaggaccaactgcccctgtaagtacagttttttggataacctcaagaagttgactcctcgacgcgatgttcccacttaccccaaggtaagatgagattccggcccagaagaagctgcagctgtgtccccagccccacgccgagccc

SEQ ID NO: 130 - DNA, 359 bp, Homo sapiens
ccgggacgatgcctgcctctactccccagcctcagctcccgaggtcatcacagtaggggccaccaatgcccaggaccagccggtgaccctggggactttggggaccaactttggccgctgtgtggacctctttgccccaggggaggacatcattggagcctccagcgactgcagcacctgctttgtgtcacagagtgggacatcacaggctgctgcccacgtggctggcattgcagccatgatgctgtctgccgagccggagctcaccctggccgagttgaggcagagactgatccacttctctgccaaagatgtcatcaatgaggcctggttccctgaggaccagcgggtactgaccc

SEQ ID NO: 131 - DNA, 389 bp, Homo sapiens
gttagaaatcaagtttttggagcaggtggatcaattctatgatgacaactttcccatggaaattcggcatctgttggcccaatggattgaaaatcaagactggtaggatcaaacatattttccctagaagttgatgcacaaatgtctgatgctctatccatgtgaatttattttatggtccactttttactcagtagatgcattcttttcaggtaaagaactttctcaaggatttgaaagccttcccaaagaaggggaataattgtcctttctggttccattcattgtaaatgaaaagttaatggttccagtgcttcttttctctgtaaacaaaaacccaaataatttttcatgtattaaaaaaagaagcaaatcaattgattgtcagt

SEQ ID NO: 132 - DNA, 465 bp, Homo sapiens
ggaggcaggagatgcggatgaagatgaggctgatgctaatagctctgactgtgaaccagaggggcccgtggaagcggaagagcctcctcaggaggatagtagcagtcagtcagactctgtggaggaccggagtgaggatgaggaagatgaacattcagaggaggaagaaacaagtggaagttcagcatcagaggaatctgagtctgaagagtctgaggatgcccaatcacagagccaagcagatgaagaggaggaagatgatgattttggggtggagtacttgcttgccagggatgaagagcagagtgaggcagatgcaggcagtgggcctcctactccagggcccactactctaggtccaaagaaagaaattactgacattgctgcagcagctgaaagtctccagcccaagggttacacgctggccacgacccaggtaaagacgcccattcccctgcttctgcg

SEQ ID NO: 133 - DNA, 354 bp, Homo sapiens
ctaaaaaacctaagggagttactgcttgaagacaaccagttaccccaaataccctctggtttgccagagtctttgacagaacttagtctaattcaaaccaatatatacaacataactaaagagggcatttcaagacttataaacttgaaaaatctctatttggcctggaactgctattttaacaaagtttgcgagaaaactaacatagaagatggagtatttgaaacgctgacaaatttggagttgctatcactatctttcaattctctttcacacgtgccacccaaactgccaagctccctacgcaaactttttctgagcaacacccagatcaaatacattagtgaagaagat

SEQ ID NO: 134 - DNA, 326 bp, Homo sapiens
  misc_feature (1)...(326): n = a,t,c or g
cccacgcgtccggngacaggcctggccggcctctgcagagacgtccaacctcgtgcgcatgcgcagccaggccctgggccagtcggcgccctcgctcaccgccagcctgaaggagctgagtctccccagaagaggaagtttccctgtgtgtccaaatgctgggagaacatcaccccttggatgaattgccaccacattaaataaaatatatccaaagctcnnnnnnnnnnnnnngggggggccgttttaaaggacccttgggggggccaaggtttacgcgggctggcaaggtaatagttttttccttatagggagccgaattaaaa

SEQ ID NO: 135 - DNA, 210 bp, Homo sapiens
cttctgtgtgtctgtcttcctgtgggtgcctgcccgtctctttctcttctaacagcccctttgaaccagctgatgcgctgtcttcggaaataccaatcccggactcccagtcccctcctacattctgtccccagtgaaatagtgtttgattttgagcctggcccagtgttcagaggtagttgggctcttctttcttggtcgacgcggccg

SEQ ID NO: 136 - DNA, 310 bp, Homo sapiens
tttttccaatacacatataaaccatcattcactaaaatgtactatatattcaatattttgtgtatactcactgcttttcctaacgtgaaaaatttaccaaaatgctaattgtgacttataaggtatttaacagactcccgacaaaaagcagaatgatcagcgaaatcggaaaagaaaagctgaaccatatgaaactagccaaggtagtaataatttcgtatcaacaaaagtactcaattctaatgtacttagatagaattttctaactcatactaaataattagtttgtacacagggattcctgataaag

SEQ ID NO: 137 - DNA, 502 bp, Homo sapiens
cttaaagtgaaatttaaaaagtaataataatttttaaaaatgtttaaaggcttactttggagagacagttttacatagcttaatattttatcattaaaggcatggtggagctggttcctgcttccgataccctcaggaaaatccaagtggaatatggtgtgacaggatcctttaaagataaaccacttgcagagtggctaaggaaatacaatccctctgaagaagaatatgaaaaggcttcagagaactttatctattcctgtgctggatgctgtgtagccacctatgttttaggcatctgtgatcgacacaatgacaatataatgcttcgaagcacgggacacatgtttcacattgactttggaaagtttttgggacatgcacagatgtttggcagcttcaaaagggatcgggctccttttgtgctgacctctgatatggcatatgtcattaatgggggtgaaaagcccaccattcgttttcagttgtttgtggacctctg

SEQ ID NO: 138 - DNA, 963 bp, Homo sapiens
ctcctagtcccctccctagcctgtcccttcctcctcccgttgctcctggtggccaggagagcccttcaccccacacagctgaggtggagagtgaggcctcaccacctcctgctcggcccctcccaggggaagccaggctggcgcccatctctgaagagggaaagccgcagcttgttgggcgtttcccaagtgacttcatccaaggaaccggctgagcctcttcccttgcagccaacatcccccactctctctggttctccaaaaccttcaacccctcagctcacttcagagagctcagatacagaggacagtgctggaggcgggccagagaccagggaagctctggctgagagcgaccgtgcagctgagggtctgggggctggagttgaggaggaaggagatgatgggaaggaaccccaagttgggggcagcccccaacccctgagccatcccagcccagtgtggatgaactactcctacagcagcctgtgtttgagcagcgaggagtcagaaagcagtggggaagatgaggagttctgggctgagctgcagagtcttcggcagaagcacttgtcagaggtggaaacactacagacactacagaaaaaagaaattgaagatttgtacagccggctggggaagcagcccccaccgggtattgtggccccagctgctatgctgtccagccgccagcgccgcctctccaagggcagcttccccacctcccgccgcaacagcctacagcgctctgagcccccaggccctggtgagactgcagtcacccagcttccatcttttccctgagacccctttctgtcgactgtttttctccaggccctgggggtctgccccgggggaatagaccccctctccccacctcccctttcctcacttagtgctctccttcccccatcctggctccaggcatcatgcgaaggaactctctgagtggcagcagcaccg

SEQ ID NO: 139 - DNA, 376 bp, Homo sapiens
  misc_feature (1)...(376): n = a,t,c or g
cgccgctttgtttctcaagagactgggaatctgtatattgccaaagtagaaaaatcagatgttgggaattatacctgtgtggttaccaataccgtgacaaaccacaaggtcctggggccacctacaccactaatattgagaaatgatggagtgatgggtgaatatgagcccaaaatagaagtgcagttcccagaaacagttccgactgcaaaaggagcaacggtgaagctggaatgctttgctttaggaaatccagtaccaactattatctggcgaagagctgatggaaagccaatagcaaggaaagccagaagacacaagtcaagagtggggaaanntcttgagaaatcccttaatttttcagcagggaggatgc

SEQ ID NO: 140 - DNA, 968 bp, Homo sapiens
  misc_feature (1)...(968): n = a,t,c or g
gcaaggggcagttggtgaacttgctgcctccagagaattttccctggtgtggaggcagccagggacccaggatgctccggacctgttacgtgctctgttcccaagctggtccccgctccaggggctggcagtccctgagctttgatggcggggccttccaccttaagggcacaggagagctgacacgggccttgctggttctccggctgtgtgcctggcccccactcgtcactcacgggctgttgctccaggcctggtctcggcgactcctgggctcccggctctcaggcgcatttctccgagcatccgtctatgggcagtttgtggctggtgagacagcagaggaggtgaagggctgcgtgcagcagctgcggaccctcagcctccgaccactgctggcagtgcccactgaggaggagccggactctgctgccaagagtggtgaggcgtggtatgaggggaacctcggtgctatgctgcggtgtgtggacctgtcacggggcctcctggagccccccagcctggctgaggccagcctcatgcagctgaaggtgacggcgctgaccagtactcggctctgtaaggagctagcctcgtgggtcagaaggccaggagcctccttggagctgagccccgagaggctggctgaagctatggactctgggcagaacctccaggtctcctgcctcaatgctgagcagaaccagcacctccgggcctccctcagccgcctgcatcgggtggcacagtatgcccgggcccagcacgtgcggctcctggtggatgcggagtacacctcactgaaccctgcgctctcgctgctggtggctgccctggctgtgcgctggaacagcccgggtgaaggcgggccctgggtgtggaacacctaccaggcctgtctaaaggacacattctagcggctggggagggatgcanaggctgcgcacagggccggcctggccttcggg

SEQ ID NO: 141 - DNA, 306 bp, Homo sapiens
agacggctgaaaagggaggggtattgagggcggttcagagggcgaggagaggggcgtagagaacctgtggagaagaagttcactggaggggcattaggcctcgcactatgtatccagatcatcagtaggggaagagaaaagatgggcaatatgtatagtcagacgagaagtgggatcaaacagagggctcatggagaagtaggctacccaccacataaccccatcataggattgcaggagatacagctatagataagaatatccaccagtcggtgagtgagcagatcaagaagaactttgccaaga

SEQ ID NO: 142 - DNA, 316 bp, Homo sapiens
ccacactcacatttaatatactgttaggttgtttactttgaggcaatgtcatcctcattagtatagggcattatattcctgaatagcagaatactcctccattcatgaagttcagtattatacattcttattattgcacaacaaatagaagactttggatttccttatataagtaccttgacagatgactaacccatttttcctatgctttacaactatgatcagtaactgtaatttttttaaaggtcctcctggacccccgggtgaaaaaggagatcgaggtcccactggagaaagtggtccacgaggatttcca

SEQ ID NO: 143 - DNA, 339 bp, Homo sapiens
gacaataccaaatgaatgaacgtgactgtgttccaacaaaactttatttacaaaaacagggatgggccggatgtagccagaggccataatttgccaacccctgatttagacgaaggaaaggagcagtgcttcactgcttttaaattaattctgtattctcacaaggcctacattgaaatggaattatagcctcattttttcttagaacctttatattttgttttattcatatacagggttgtcaagctggacagactattaaagttcaagtctcctttgatttgcttagtctgatgtttacatttgtaagtccatgtaccaacgatttaatcatacacg

SEQ ID NO: 144 - DNA, 2018 bp, Homo sapiens
acaagttatctgtgaatcataggagaacacatcttacaaaactcatgcacactgttgaacaagctactttaaggatatcccagagcttccaaaagaccacagagtttgatacaaattcaacggatatagctctcaaagttttcttttttgattcatataacatgaaacatattcatcctcatatgaatatggatggagactacataaatatatttccaaagagaaaagctgcatatgattcaaatggcaatgttgcagttgcatttttatattataagagtattggtcctttgctttcatcatctgacaacttcttattgaaacctcaaaattatgataattctgaagaggaggaaagagtcatatcttcagtaatttcagtctcaatgagctcaaacccacccacattatatgaacttgaaaaaataacatttacattaagtcatcgaaaggtcacagataggtataggagtctatgtgcattttggaattactcacctgataccatgaatggcagctggtcttcagagggctgtgagctgacatactcaaatgagacccacacctcatgccgctgtaatcacctgacacattttgcaattttgatgtcctctggtccttccattggtattaaagattataatattcttacaaggatcactcaactaggaataattatttcactgatttgtcttgccatatgcatttttaccttctggttcttcagtgaaattcaaagcaccaggacaacaattcacaaaaatctttgctgtagcctatttcttgctgaacttgtttttcttgttgggatcaatacaaatactaataagctcttctgttcaatcattgccggactgctacactacttctttttagctgcttttgcatggatgtgcattgaaggcatacatctctatctcattgttgtgggtgtcatctacaacaagggatttttgcacaagaatttttatatctttggctatctaagcccagccgtggtagttggattttcggcagcactaggatacagatattatggcacaaccaaagtatgttggcttagcaccgaaaacaactttatttggagttttataggaccagcatgcctaatcattcttgttaatctcttggcttttggagtcatcatatacaaagtttttcgtcacactgcagggttgaaaccagaagttagttgctttgagaacataaggtcttgtgcaagaggagccctcgctcttctgttccttctcggcaccacctggatctttggggttctccatgttgtgcacgcatcagtggttacagcttacctcttcacagtcagcaatgctttccaggggatgttcatttttttattcctgtgtgttttatctagaaagattcaagaagaatattacagattgttcaaaaatgtcccctgttgttttggatgtttaaggtaaacatagagaatggtggataattacaactgcacaaaaataaaaattccaagctgtggatgaccaatgtataaaaatgactcatcaaattatccaattattaactactagacaaaaagtattttaaatcagtttttctgtttatgctataggaactgtagataataaggtaaaattatgtatcatatagatatactatgtttttctatgtgaaataggtcctgtccaaaaatagtattggccagatatttgggaaaagtaaattgggtttcctcagggagtgatatccccttgcacccaagggaaaagattttctttctaacacgagaagtatatgaatgtcctgaagggaaaccctgggccttgatatttctgtgactcgtgttgcctttgaaactagtcccctaccacctcggtaatgagctccattacagaaagtggaacataagagaatgaaggggcagaatatcaaacagtgaaaagggaatgataagatgtattttgaatgaactgttttttctgtagactagctgagaaattgttgacataaaataaagaattgaagaaacaaaaaaaaaa

SEQ ID NO: 145 - DNA, 429 bp, Homo sapiens
ggcacgagggaagctgccccgtccaggttcatgttcctcttatttctcctcacgtgtgagctggctgcagaagttgctgcagaagttgagaaatcctcagatggtcctggtgctgcccaggaacccacgtggctcacagatgtcccagctgccatggaattcattgctgccactgaggtggctgtcataggcttcttccaggatttagaaataccagcagtgcccatactccatagcatggtgcaaaaattcccaggcgtgtcatttgggatcagcactgattctgaggttctgacacactacaacatcactgggaacaccatctgcctctttcgcctggtagacaatgaacaactgaatttagaggacgaagacattgaaagcattgatgccaccaaattgagccgtttcattgagatcaacagcctc

SEQ ID NO: 146 - DNA, 717 bp, Homo sapiens
gatgaaacttccggtctcattgtccgggaagtgagcattgagatttcgcgccagcaagtggaagaactctttggacctgaagattactggtgccagtgtgtggcctggagctcagcgggtaccacaaagagccggaaggcgtatgtgcgcattgcataggaactcatgacctgacatccattagcagagtcatcagagtcatctggctgctgtgttgagaatggaccatgctgggcaaggggagaagcaggaagaccagtgatgagactgcagctatgagagatgttaagctactgtagattggaagcagtggaggtggtgaggccaggatttcagatatatttaaaagtagagataacagcttttgttgagaccttggatgtgtgatgtgagagaaagaagagaaaggatgattttgaaagggcctaagcctttatccaaggatttctttcaaatgtctttagtgaagccattcctgcctcacagagggaggaggctgggcattcctttctcaatactttcagagcagtttgtccatacccctaatatagtgcttgtctcatttcgaattatattcactcgtaaaatttgtgtttcatgccagtgagttccatgagatcaagaattctattgtacttaattttatatctctcctgcttagcacaatacctagagtatcacagatgtttaacaattttcttgaattaaaactgttat

SEQ ID NO: 147 - DNA, 367 bp, Homo sapiens
ggcacgagatcgattcatgtaaagctggacgtgggcaagctgcacacccagcctaagttagcggcccagctcaggatggtggacgacggctctgggaaggtggagggcctacctgggatttgaccagagtccgcctggctccaggctctgccacccacaggaagaagaaactacactgacagatgtgagacagtgtttccccttcagtctttgaacaggctttgtgttttctaaatgacactggataaaagggaattcattcaagagctccaaggcttccctttccgcccggcttctgttgccctggcctgagcagcgagcagctgggaggggactgaactgcccctaaccagggttgtggctggcg

SEQ ID NO: 148 - DNA, 791 bp, Homo sapiens
  misc_feature (1)...(791): n = a,t,c or g
cgagacccgaccctgggcgtggtgcatcgaggtagatgcaaagatgctggccagagcaagtgtcgcctggagcgggctcaagccctggagcaagccaagaagcctcaggaagctgtgtttgtcccagagtgtggcgaggatggctcctttacccaggtgcagtgccatacttacactgggtactgctggtgtgtcaccccggatgggaagcccatcagtggctcttctgtgcagaataaaactcctgtatgttcaggttcagtcaccgacaagcccttgagccagggtaactcaggaaggaaagatgacgggtctaagccgacacccacgatggagacccagccggtgttcgatggagatgaaatcacagccccaactctatggattaaacacttggtgatcaaggactccaaactgaacaacaccaacataagaaattcagagaaagtctattcgtgtgaccaggagaggcagagtgccctggaagaggcccagcagaatccccgtgagggtattgtcatccctgaatgtgcccctgggggactctataagccagtgcaatgccaccagtccactggctactgctggtgtgtgctggtggacacagggcgcccgctgcctgggacctccacacgctacgtgatgcccagttgtgagagcgacgccagggccaagactacagaggcggatgaccccttcaaggacagggagctaccaggctgtccagaagggaagaaaatggagtttatcaccagcctactggatgctctcaccactgacatggntcaggg

SEQ ID NO: 149 - DNA, 335 bp, Homo sapiens
ggcacgagcaaactcggggctcagcttggggacgggagttgatagtcaggtgcctggaacataatggagaccgtccatattggttgaatgagtggatgaatgaattaatgaatttcttttctcttaagtcctgcagctgattaagtcacagaaatttctgaataagttggtgatcttggtggaaacggagaaggagaagatcctgcggaaggaatatgtttttgctgactccaaagtaagtgacagcaaacttctaaagtgggctgtgaggtagggaggggacacaagcgttttgaggctcgctgtgtgccagggagtgtatcattagctcactc

SEQ ID NO: 150 - DNA, 1293 bp, Homo sapiens
cgacgcctgtccctcttagacttgcagctcggtcctcttggcagagaccccccgcaggagtgcagcaccttctccccaacagacagcggggaggagccggggcagctctcccctggcgtgcagttccagcggcggcagaaccagcgccgcttctccatggaggacgtcagcaagaggctctctctgcccatggatatccgcctgccccaggaattcctacagaagctacagatggagagcccagatctgcccaagccgctcagccgcatgtcccgccgggcctccctgtcagacattggctttgggaaactggaaacatacgtgaaactggacaaactgggagagggcacctatgccacagtcttcaaagggcgcagcaaactgacggagaaccttgtggccctgaaagagatccggctggagcacgaggagggagcgccctgcactgccatccgagaggtgtctctgctgaagaacctgaagcacgccaatattgtgaccctgcatgacctcatccacacagatcggtccctcaccctggtgtttgagtacctggacagtgacctgaagcagtatctggaccactgtgggaacctcatgagcatgcacaacgtcaaggtgaggcctcgggggcagggtccccccatcttggcagccacctgtccagaagcccagtgtggggacccactctcaccaccagggatccggctgctgaggtggctcaaaccttcccacgtaggaaagagggagagggcaatgccatcaacgagtccaggaactgggttgagcgctttaccccaagaacagacacacactgtctgccactgtctagctgttggtataaaacccactctcaactctgaacatcagtttcccagtctgtcaaatgggagtgtgagctacctgccaaaatgcagggaggcttctggggaagctcggggttatgaatgacctctcctggtgtttgttaaagaatcaagactgggcatggtggcccacgcctgtaatcccagcactgggaggccaaggcaggaagatggcttgagcccaggagtttgagaccagcctgggcaacatggcaagacctcatctctactaaaaattgaaaaattagccgggcacagtagcgtgcacccatagtcccagctgcttgagaggctgaggcaggagggccacttgagcccgggaggttgaggctgcagtgagccatgatcacaccactgcactccagcatgggtgacagagtaaaaccctgacatgtattgcgggcgctctagaggataacaagcatac

SEQ ID NO: 151 - DNA, 349 bp, Homo sapiens
ggcacgagcggcacgagccttctcctactgcattagcatttggggaccaccctattgtacaaccaaagcaattatcctttaaaattattcaggtaaatgataattaaaatgtttttttctatggcttctaagaaaccattgactaacttactaacaactaagatgtctgtttgttttatatgtagtcataaagcagaattacacatcaagaaagataacttactaaacaaaaacaacagaatttgtaggaaggagtgagaaactgaaacacacaatttactatcagctttttaaacaaccgttaacatgtcagttctgtttactgattctttctgaacttaatttccag

SEQ ID NO: 152 - DNA, 324 bp, Homo sapiens
ggcacgaggaccttccttgctttcagaatttcacccagggtctgacaggcctcaagaaaggagaactagttatgaaccgattcatccaggcccatccccagtggatcatgattcactggaatcgaagcgaccacgtctggaacaggcttctgattctcattatcagggtcacatcactggcgaatccctaccaggacgtgtacactagcagctcctcactgtggaatctgatgggcaatgccatggtgattacccactatatccgtcttaccccatatgttcaaagtaaactcggttccctagggaacctgatgccatgttacc

SEQ ID NO: 153 - DNA, 377 bp, Homo sapiens
ggcacgagaaaagaagaattcagtgcagaagaaaattttctcattttgacggaaatggcaaccaatcatgtacaggttcttgtagaattcacaaaaaagctaccaggtattttttaaataatcacagttaatatttattgagagtttaaatatgtgcccacagattagattacctattttacatacggtgttttaattttcaaaacattcctgtgagatcagctctattttcactattactttgccaagtattttcacatgtacttatttcactgctattctctacaatagtcttgtgacattgagaaaggcaggtctgttctttgtaaaatgaaaatcatttaatatctgatttaaagtaactgtcgaactactat

SEQ ID NO: 154 - DNA, 1224 bp, Homo sapiens
ggttttttttttttttcttttgggaaaggcattggccactttggactttattagcaacagtaatgtcccctgacatacgcacaagcttgtagctccacggccaggtcttcccccaacctcacaatggccccgtgatgcaggcaggcaggcgagtgggggtctcccctccttatccacagggccaccgaaaggcccacgagacggccttgcccgaggtcacccagcggagtggcttgctgggagccctgggaataacagtcccacacaaggctctctccctccgcagctggacctgtacgcgggggctctgtttgtgcacatctgcctgggctggaacttctacctctccaccatcctcacgctcggcatcacagccctgtacaccatcgcaggtatggtgcctgcagcagggaggtccacccaggggacgtgtaaaggggtcagaaggccacctccccctacaggcccgagggagcagcccaggaagtggccccagcaggagccccagaagttcctccccgtgtccctcctccctggggccagggccccctccagcaaccttgcttccactggcagggggcctggctgctgtaatctacacggacgccctgcagacgctcatcatggtggtgggggctgtcatcctgacaatcaaaggtgaggacagagtctgtggccatggcggggctgtccccacagcgagccctttggagtctggcactgcccggcactgtgcaggattcatgccgttggggttctgggtagcatcgctgggagtgggtgggttcaggaggttgagccactaggcagtcagcccccctgctggcccctcagggactgccctggctggtagaggctacccaccctgctgccccgctgttaccagctctggccctggcaaggagctgactcaggaactcagggccagccacacccgcattggctcagcgcttgatggtgaggtggggctgtaggcgggtgtgaaggcacacaaccaggaggccataaaactgcctgggcagctcctccaattgtttaaaagcatgtacaaaatgccaagaggtgatgctacctcctgcaggacaaaggccagggaggaaagaagagagctgggagagattggcgatactagtctggaacagataggaaactcacagggctgcccggagagagcgtgagctcaccgtccctggaagtatgtaagcagagccaggagctcgtgcc

SEQ ID NO: 155 - DNA, 345 bp, Homo sapiens
  misc_feature (1)...(345): n = a,t,c or g
ggcacgagcggcacgagatctgaagaggtatattgcttacagaaagagcgggagatggtaaatcacagtcttcaagagacttctgagcaaaacgttattctacagcatactcttcagcaacagcagcaaatgttacaacaagagacaattagaaatggagagctagaagatactcaaactaaacttgaaaaacaggtgtcaaaactggaacaagaacttcaaaaacaaagggaaagttcagctgaaaagttgagaaaaatggaggagaaatgtgaatcagctgcacatgaagcagatttgaaaaggcaaaaagtgattgagcttactggcactgccaggcaagtn

SEQ ID NO: 156 - DNA, 340 bp, Homo sapiens
ggcacgagcttctacttgtacaggaaaggttacttgagtttgtccaaagtggtgccgttttctcactatgctgggacattgctgctacttctggcacgtgtggcctgcctcctaggcattgtccgctgggcctacccccacttcccgcagtttctcgccatctcctctccgatccatctctacctgacgtcataactctatatgcatgttatgcggtccatcttagtcttctaaaaaggccattttagcttacctgccatcaagctatacatgtggaaatatacactgtattattttccctttccaggtgattacttacctcatctgttcttatatctgc

SEQ ID NO: 157 - DNA, 478 bp, Homo sapiens
  misc_feature (1)...(478): n = a,t,c or g
gagactccaagccccagtttcacctcagaggcagagatgaggggtcccccggtcctgctcctccaggccgccccaatggagtgtcctgttccgcaggggatcccggccgggtccagtcctgagcctgcacctgaccccccggggcctcatttcctccggcaggagcgcagcttcgagtgccgcatgtgcggcaaggccttcaagcgctcgtccacgctgtccacccacctgctcatccactcagacacgcggccctacccctgccagttctgcggcaagcgtttccaccagaagtccgacatgaagaagcacacctacatccacacaggtgagaagccgcacaagtgccaggtgtgcggaaaggccttcagccagagctccaacctcatcacccacagactcagagagaacccaccatggtgctgtctcctgccgacaagaccaacgtcaaggccgcctggngtaagggtcgcgcgca

SEQ ID NO: 158 - DNA, 332 bp, Homo sapiens
ggcacgagcagctcaccaacaacacagccactgccccctctgccacgcccgtgtttgggcaagtggcagccagcaccgcaccaagtctgtttgggcagcagactggtatcacagccagcacagcagttgccactccacaggtaatcagctcaaggttcattaatctagatttttagtatatagtattattgaatatatataatgttttatatattagactttatacttgagacataggaaataatttatgtataactgttaattaaattttatatttgctagattagaaaattctattaatttattaatgaattatatctaattatgtgaca

SEQ ID NO: 159 - DNA, 868 bp, Homo sapiens
cccacgcgtccggaataaagagagaactctgttactattgtttttacatcaccaaataattatttaatatcgttagctaagagaagaattggctatgaactgtactttaacaactgacacaactgcatacaagttataaagtttaataatctttatcatcttggaaaataaatctcttcttgctaagtatcagtttttaaaaattgccccatgtattagatatgtatttttttaacaaaaatgttctgtgtattaattattttgaaataaattttaagttcacaaaaagccattacaagaagtggaaatagcagcaattacacatggtgctcttcagggattagcctacttacattctcatactatgattcatagagatatcaaagcaggaaatatccttctgacagaaccaggccaggtgaaacttgctgactttggctctgcttccatggcatcacctgccaattcctttgtgggaacgccgtattggatggccccagaagtaattttagccatggatgaaggacaatatgatggcaaagtagatgtgtggtctcttggaataacatgtattgaactagcggaaaggaagcctcctttatttaatatgaatgcaatgagtgccttatatcacatagcccaaaatgaatcccctacactacagtctaatgaatggtgagtattgttaatatatatattgctcagtgttgaataaatgaaatgctttttcataatctgttatcaaagtgatttaatttcagttaggtaaaatgtatcaccttataagatattaaaatagatgtattttacccttttaaatatatttattctttatcatgtttccatttcatggcatacgtataactgg

SEQ ID NO: 160 - DNA, 1404 bp, Homo sapiens
gcgccacgcgcggcctggcggcggcggccactctaaccagcgcaaaatgtccctggaacaggaggaggaaacgcaacctgggcggctcctaggacgcagagacgccgtccccgccttcattgagcccaacgtgcgcttctggatcaccgagcgccaatcctttattcgacgatttcttcaatggacagaattattagatcctacaaatgtgttcatttcagttgaaagtatagaaaactcgaggcaactattgtgcacaaatgaagatgtttccagccctgcctcggcggaccaaaggatacaggaagcttggaagcggagtcttgcaacagtgcatcccgacagcagcaacctgatccccaagctttttcgacctgcagcgttcctgcctttcatggcgcccacggtatttttgtcaatgacgccactgaaagggatcaagtccgtgattttacctcaggttttcctctgtgcctacatggcagcgttcaacagcatcaatggaaacagaagttacacttgtaagccactagaaagatcattactaatggcgggagccgttgcttcttcaactttcttaggagtaatccctcagtttgtccagatgaagtatggcctgactggcccttggattaaaagactcttacctgtgatcttcctcgtgcaagccagtggaatgaatgtctacatgtcccgaagtcttgaatccattaaggggattgcggtcatggacaaggaaggcaatgtcctgggtcattccagaattgctgggacaaaggctgttagagaaacgctagcatccagaatagtgctgtttgggacctcagctctgattcctgaagtcttcacctacttttttaaaaggacccagtatttcaggaaaaacccagggtcattgtggattttgaaactgtcttgtactgtcctggcaatgggactgatggtgccattttcttttagtatatttccacagattggacagatacagtactgtagtcttgaagagaaaattcagtctccaacagaagaaacagaaatcttttatcacagaggggtgtaggccgtgagttttaggtgaatttatgtggttccctgcttgaaaaccttccccctctcccaggttcggtttagagaactttgcccacaggtcttctggggaccccagaggtgtctgtgctgacaaggcgacttcagattccatactgagatcgttcccaggctggcgtctctggggtttttaaggctggctggagaagacagtgggaagggtgccccgtctgacacccctggggttgctgagggaacggttggagtggggatcggcctgcgaaaggatactgtgaaatcactaattaactaataaacctgtctcaagttgaggatttgaagaaaaaaaaaaaaaag

SEQ ID NO: 161 - DNA, 562 bp, Homo sapiens
cccacgcgtccgggagattggaagtcttctataacgggacctggggcagcgtcggcaggaggaacatcaccacagccatagcaggcattgtgtgcaggcagctgggctgtggggagaatggagttgtcagcctcgcccctttatctaagacaggctctggtttcatgtgggtggatgacattcagtgtcctaaaacgcatatctccatatggcagtgcctgtctgccccatgggagcgaagaatctccagcccagcagaagagacctggatcacatgtgaagatagaataagagtgcgtggaggagacaccgagtgctctgggagagtggagatctggcacgcaggctcctggggcacagtgtgtgatgactcctgggacctggccgaggcggaagtggtgtgtcagcagctgggctgtggctctgctctggctgccctgagggacgcttcgtttggccagggaactggaaccatctggttggatgacatgcggtgcaaaggaaatgagtcatttctatgggactgtcacgccaaaccctggggacagagtgactgtggaca

SEQ ID NO: 162 - DNA, 1812 bp, Homo sapiens
gccttgcttggaggcaaagcgtcctccactctgtcctcaggactcagctgtgtggccttggatttctttttgcgggacttgcgccctttgggtgccaacggtccaggatccccctggaaccagatggtacggccatgccggtcctgcagggagctcatgcctggcatgccatagcagcgcagccaggctcgaaaggcagcaaagtcctcctccccgctctctgacccgtagcccctgccccccaactggaccacttccttgggcactgagtgacatagctccagcaggtctggattctgcagcttggtccttatcttctggctcagggtcagctccgggctcggcctgtgctgctgcagggcctccaggaccgagcgggccttctcaaagggggggatcttcagccggtacaggatctctgcccgcagatagttgccaatgccattgaagaacctctggtccaggagggcctcgcagatgggccggtcaaaggccttatccgctaggtttcgtagcacattctccctgaactgctggtactcctgcaagacacagggcccgcggcccggctgccactttcccccaaggtcccagcggccgaaccggcggatgtccacgaaacatagggcgagccgggggccaggcggggccgtgtaaaagcgcaggtgggcatggcgtggcagctcctcgcggggcaccagctgaaaagagccggacatgccgaagcggaagaccagggccagtggctcctgttggggctgggccccaggcagagggctcagtatcaggcgcagctccttgccgcgggctgaagctgagatgcggtaggcactgctctcaaagggcacctcagggttgcggctgacagaggacttctccacgcagccgccgaacaccagcgccctgcaggcctcattcacaaactggctggccaggtgcagctcggggccctcaggcatcctgagggagggtggcagagtcctggctgggaggtggcggaagaacctgacttcccactgcctggcgccggcgagatgcgggggcaggtctgaggccccgggtcgccgctgtctctgcggttgggggaagtcacccagctagcgtgggacagggtcggcacccccagcaggaaacagcagcgacgagccagagcggagtcgcctgcagctgcgcgcaggacgtgcacaggtgcgcggtacgcacaggccctagggacccggtggggatcttaagcaccaacgaacagtcagacctaactcataaacaaacatcatcacggcctgccctgtcagaagcgcagccaagcaacaacaacaacaaaaaaaggcgaggaggtagacccacttgagatggttctgttgcggagagtctctgaaatcagaaagcgccagtccgcaaaaacgaggaaacccgacgtgtccggcggaaggaaccgccagtacaaaggccctgaggcgagaaagagattggtcactgaaagaactcaaagaagtcctgtgtggctggagtatagctgcgggttagtgctggcaggtgaagacagagaagcaaacccaggtcaggtccggttgggcctcgggagggcctccgtgtggagtctgcacttcattctaagtgtatacctaacccatcgccacgatttcccctccttcacactaccctgctacgtctccttattaggcgtaataaaattatgtggctttgtaagaaattggtttttagagatgcatgttaaagtattgggtatgaaatgtcatgatttgtctaatttactttaaaatacttctgccataataaatgaatagaattaac

SEQ ID NO: 163 - DNA, 333 bp, Homo sapiens
agctgacgtggtctgcctgttattggagagatatattaagaatccagttgtggattgcagctgatattcttttgcgaatgcttgaaaaagcacttctttatagtgaacaccagaacatcagcaacactggactgtcatcccaaggcttattgatatttgcggagttgattcctgccattaagaggacgttggctcgccttctcgtgatcattgcgagcctggactatggcattgagaaacctcatttaggaacaggcatgcaccgtgtgatcggactgatgcttctatacttaatctttgcaaatgctgaaagcgtgattagagtcattgggg

SEQ ID NO: 164 - DNA, 134 bp, Homo sapiens
ttttttttttgagatggagtctcgctctgctgcccaggctggagtgcagtggtgcaatcttggctcactgcaagctctgcctcccaggttcacgccattctcctgcctcagcctcccgagtagctgggactaca

SEQ ID NO: 165 - DNA, 839 bp, Homo sapiens
cctgagcccggcgagcaggagaggaggtcttccgggccgcggcctccgagcgcgcgggatttgcagaacttaatatgaatgtgaagaacttgcaaagaaacttgaaaacagccaaagggatggcatatcaagaaataaattggccttggcagaattgtatgaagatgaagtgaagtgcaaatcttccaagtctaatagacctaaagccacagtcttcaagagcccacggacaccacctcaacggttttactcaagtgaacatgaatacagtggattaaatatagttcgaccttcaactgggaaaattgtgaatgaacttttcaaagaggcaagggaacatggggctgtccctctgaatgaagccacaagagcttcaggtgatgataaatctaagtcatttacaggtggaggatacagattgggtagttctttttgtaagcggtctgaatatatctatggagaaaatcagctgcaagatgttcagattttgcttaaactgtggagcaatggtttcagtttagatgatggagaattgagaccttacaatgaaccaacaaatgctcaatttctggagtctgttaagagaggggtgactctcattgcatgtatgcctgaaattcagcaacttatgttagaaatcttttaatgtggcattactgctggcagaagatttcaaaaggttagtttgaagttataatttgtgaaagtaaactcagatattcagtgctctcacccatccaaagaacattgtaacttaccagctcttcttgctaaaggatgaggaatcaagtgattttgctatgataataaaagcttttctgtgttatgattaaaaaaaa

SEQ ID NO: 166 - DNA, 1256 bp, Homo sapiens
ctcgatcacctgatggccctgcggcgcagctcccgggttgacccacgcgtccgagcggatgttcactctcacgaccatgattcaagctcttgcacctgttatgggatgggacaggaagccactgaagatgttttcatcagaagagatgagaggacatcttcatcatcatcataaatgtctgacgaagatcctgaaggttgaggggcaggttccagatctgccatcctgcctgcccctgactgacaacacccgcatgctggcctctatcctcatcaacatgctctatgatgacctgcgctgtgacccggagcgcgatcacttccgcaagatctgtgaggaatatatcacgggcaagtttgacccccaggacatggacaagaacttgaatgccatccagacagtgtcagggatcctgcagggcccctttgacctgggcaaccagctgctgggactgaaaggtgtgatggagatgatggtggcactatgtggctcagagcgcgagacggaccagctggtggccgtggaggccctcatccatgcctccacgaagctcagccgcgccaccttcatcatcaccaatggagtgtcactgctcaaacagatctacaagaccaccaaaaatgagaagatcaagatccgcacactggtgggactctgtaagctcggctctgcaggtggcacagactacggtctcaggcagtttgcggaagggtcgacagaaaaactggccaaacagtgtcgcaagtggctgtgcaatatgtccatagacactcggacccgacgctgggcagtggagggcctggcctacctcacgctggacgctgatgtgaaggacgactttgtccaggacgtccctgccctgcaggccatgtttgagctggccaagaccagtgacaagaccatcctgtactcggtggccaccaccctggtgaactgcaccaacagctacgatgtcaaggaggtcatcccagagcttgtccagctcgccaagttctccaagcagcatgtgcccgaggaacaccccaaggacaagaaggactttatagacatgcgggtgaagcggcttctgaaggcgggtgtcatctctgccctggcttgcatggtgaaagcagatagtgccatcctcactgaccagaccaaggagctgctggccagggtattcctggcactgtgtgacaacccaaaggaccgaggcaccattgtggctcaaggtggtggcaaggccctgattcccctggctttggagggcacagatg

SEQ ID NO: 167 - DNA, 892 bp, Homo sapiens
atgtggacagcgtgggtggcggcagcgagtctcggtccctggactcacccacttccagcccaggcgctggcacgaggcagctggtgaaggcttcgtccacaggcactgagtcctcagatgactttgaggagcgagaccctgacctgggagacgggctggagaatgggctgggcagccccttcgggaagtggacactgtccagcgcggctcagacccaccagctgcggcgactgcggggcccagccaagtgccgcgagtgcgaagccttcatggtcagcgggacggagtgtgaggagtgctttctgacctgccacaagcgctgcctggagactctcctgatcctctgtggacacaggcggctcccagcccggacacccctttttggggttgacttcctgcagctacccagggacttcccggaggaggtaccctttgtggtcacgaagtgcacggctgagatagaacaccgtgccctggatgtgcagggcatttaccgggtcagcgggtcccgggtccgtgtggagcggctgtgccaggctttcgagaatggccgagcgttggtggagctgtcggggaactcgcctcatgacgtctcgagtgtcctcaagcgatttcttcaggagctcaccgagcccgtgatccccttccacctctacgacgccttcatctctctggctaagaccttgcatgcagaccctggggacgaccctgggacccccagccccagccctgaggttatccgctcgctgaagaccctcttggtacagctgcctgactctaactacaacaccctgcggcacctggtggcccatctgttcagggtggctgcacgatttatggaaaacaagatgtctgccaacaacctgggcattgtgtttgggccgacactgct

SEQ ID NO: 168 - DNA, 394 bp, Homo sapiens
ggactccatgtcatctctctgcacagcgctgatggtcgtcactgggaggatcccctttctgagcttgacagtgaacgtgtgtctgcatttcttgtcactgagaccctggtgttctatttgttctgtctccttgcagatgaaaccgtcgtgccaccagatgttccaagctacctctcttctcaggggaccctttctgaccgacaagaaaccgtggtcaggaccgagggtggccctcaggccaatgggcacattgagagcaatggtaaggcctcagtaaccgtgaagcagagctctgctgtgactgtgtctctgggtgctggaggtggcctccaggtctttacagggcaggtacctggcattagatggggcaaacttggtgaagcccacgcgtccg

SEQ ID NO: 169 - DNA, 550 bp, Homo sapiens
ctgtgacacctccgggcagcccggcacttgttgctcccacgacctgttgtcattcccttaacccggctttccccgtggccccccgcctcctcccggcttcgctccttttcatgtgagcatctgggacactgatctctcagaccccgctgctcgggctggagaatagatggttttgtgaaaaattaaacaccgccctgaagaggagccccgctgggcagcggcaggagcgcagagtgctggcccaggtgctgcagaggtggcgcctccccggcccgggacggtagccccgggcgccaacggcatgacagactcggcgacagctaacggggacgacagggaccccgagatcgagctctttgtgaaggctggaatcgatggagaaagcatcggcaactgtcctttctctcagcgcctcttcatgatcctctggctgaaaggagtcgtgttcaatgtcaccactgtggatctgaaaagaaagccagctgacctgcgcaacctagcccccggaacgcacccgccctttctggccttcaactggtacgtgaagaca

SEQ ID NO: 170 - DNA, 422 bp, Homo sapiens
cttggattcagtgatggacaggaagccaggcctgaagaaattggctggttaaatggctataatgaaaccacaggggaaaggggggactttccgggaacttacgtagaatatattggaaggaaaaaaatctcgcctcccacaccaaagccccggccacctcggcctcttcctgttgcaccaggttcttcgaaaactgaagcagatgttgaacaacaagtgctctacaagtatagaaagaagccttcctcttcccaccgtccccagacaccacataatggaaaaagcaagaattttctgcataagcaaggccttaaaaaaaaaaaagccagcctctgatgggacttttttcctgccaaaaatcccactggtccactgtcgcaatttttacaaaaggccacgataaaagagtaaggcccattttg

SEQ ID NO: 171 - DNA, 1042 bp, Homo sapiens
cggacgcgtggggtcatggagctggcactgcggcgctctcccgtcccgcggtggttgctgctgctgccgctgctgctgggcctgaacgcaggagctgtcattgactggcccacagaggagggcaaggaagtatgggattatgtgacggtccgcaaggatgcctacatgttctggtggctctattatgccaccaactcctgcaagaacttctcagaactgcccctggtcatgtggcttcagggcggtccaggcggttctagcactggatttggaaactttgaggaaattgggccccttgacagtgatctcaaaccacggaaaaccacctggctccaggctgccagtctcctatttgtggataatcccgtgggcactgggttcagttatgtgaatggtagtggtgcctatgccaaggacctggctatggtggcttcagacatgatgggtctcctgaagaccttcttcagttgccacaaagaattccagacagttccattctacattttctcagagtcctatggaggaaaaatggcagctggcattggtctagagctttataaggccattcagcgagggaccatcaagtgcaactttgcgggggttgccttgggtgattcctggatctcccctgttgattcggtgctctcctggggaccttacctgtacagcatgtctcttctcgaagacaaaggtctggcagaggtgtctaaggttgcagagcaagtactgaatgccgtaaataaggggctctacagagaggccacagagctgtgggggaaagcagaaatgatcattgaacaggtaaaaaggggaaacactcagaggcgagcctgcttggctttttctggtgggtacagggcccatggttggtgttgtcaaacttggagtctacactgaggctccccacatatctgcaaatgattgcatgctggataataaatctcttgggtctaagcagtgatgtagtggctccttacagagtcagaaagccacccaggcctgcaagacttgcttgtccttcactaaatgtaaaaattctatt

SEQ ID NO: 172 - DNA, 890 bp, Homo sapiens
aaagtagtaggttggtgcaaacgtagtaataaattggtttggccctgttttcatagaactatagaggttggacctttgtccccttccagatgcctacaaacaaactgatgtttttgatttttttttctttttaaattttggttgccactaattcttataaaaatcctcacacaaggctgggctcagtggctcacacctgtaatcccagcactttgggaggctgaggcaggcggatcacgaggtcaggagatcgagaccatcctggctaacacggtgaaacccccgtctctactaaaaatacaaaaaaattagccgggcgtggtggcgggcgcctgtagtcccagctactcgggaggctgaggcaggagaatggcgtgaacccgggaggcagagcttgcagtgagccgagatagcgccactgcactccagcctgggcgacagagcaagactccatctcaaaaaaaaaaaaaagtgataatactgtaatcccagcactttgggaggccgaggcaggcggatcacgaggtcaggagatcgagaccatcctggctaacacggtgaaaccccgtctctactaaaaatacaaaaaattagctgggcgtggtggcgggcacctgtagtcccagctacctgggaggctgaggcaggagaatggcgtgaacccaggaggcggagcttgcagtgagcggagatcatgccactgcacttcagcctgggcgacagagcaagactccatctcaaaaaacacacacacacacacacacacacacacacacacaaatagaaaaataataatagttttaagcacctctaaagtacagatattgtgccaagcaatttatgtgaattgattagattgataactctaaaaatagtttccctaatcaact

SEQ ID NO: 173 - DNA, 1922 bp, Homo sapiens
tttctttcttcatccaaaatagtagagatgtctttcccacgatgacctgtgatggtggagatatcttttcctcggccaactcctcctccatcggcttctttgatgtcatcttcaatagcttcatcaattgcttcatcaaactcatcaaatctgtagcttatacatttccttgttcttgttgacctcctttcaaagcaagtttgctttggatttttttgaatcttttttcttttcttcttgatcttcagaaaagtctggctctttgtggaggaatgatgttttcaatactggataccaacatacaccaagcgttcttttccttcgttccggcaacgctctttccttctttaaggcaacatcccaaatcctggaaactggtcctctaatttttccaacaagagcaagtttaatgttgggcaaaaggtggggcaagaacccatcctcccatctggggatggatcatcagaggaggggcgaaaggcagggcagtatggtatccactatcgcaagagtcacacagaagaattagctcaggatggtttggaaggccacattttttgcatggttcatcatcatctgctaggatggcttcttcactttccttttcttcctcctcttctgaagctgcagatgatttttcactgccagacccttcactttcatcattgctggaatatttccatctgccacgtgtccgagaaccagtccatcgaactttgcctttgggttttaccttgcttactttagaatttgtatctttctctgattttttcaaaatttcctttttgtcagttttttgcaaagctgttgactcttcttccacctcatcttctccttcccctctttttttatcagctttctgatctctgatctcagccacttttgcagtgggtctagatattcttggagatcttcttaaagtacgacccacatttgttttctcctcttccttttctgtcttctcttgcttgttttctggttctagaactttggggggagaatcgggcttctttttccgacttgatatcctgattgttaatttgatgccctctttctgcctttcagaggttatctctgtattttctgaggcagtggtttcttcttcaggaaccaacttatatttgaatttgcttttttgcatagaaccctttgtctcagaaggctcctctatgccagaggtctgggcattgtccagattatccatttctacctttgtgaactcagaatcctcttttagggtttctaggtctacttttttcacagactggccaccaacagtacttgtactctggcattctaccacttctttttctgaggctagtttctcacagtggtcaatgatattagatggtggagaagtttcagctgcctcaggagagccaggcttttctgactctagagtactctttggaacttcttctggtattggactcaatctttgtgcgtccttatcaagaaaagtctttttggacttctctaacttttcaagacattctaggattggtgggcgcttatccttcttagttttgggagacttctcttcacctttcatggtacacgactcggtggaagataaagcagtttttgaagagagatcttttgccatctcagaagaatcaagagaagtttccatttctggaggatcgggttcctctatttgtgctttttgactatggatctctaagactgatattgaactatctgcatctttcctcaaaggggctgtttctttctcaagctcacctgttttcatacttggttatgacagaatttaaggactctgttccatttccctccgtgatgatatttctgtccttaggggggctatagctctcttcctttgtctcataaaactttgtctctacttggttctgtcttaaaatttggagctaccctttcatcactaacttctccatttacca

SEQ ID NO: 174 - DNA, 537 bp, Homo sapiens
aaaagcggcgcggctcgttcaagatggcggagctcgaccagttgcctgacgagagctcttcagcaaaagcccttgtcagtttaaaagaaggaagcttatctaacacgtggaatgaaaagtacagttctttacagaaaacacctgtttggaaaggcaggaatacaagctctgctgtggaaatgcctttcagaaattcaaaacgaagtcgacttttttctgatgaagatgataggcaaataaatacaaggtcacctaaaagaaaccagagggttgcaatggttccacagaaatttacagcaacaatgtcaacaccagataagaaagcttcacagaagattggttttcgattacgtaatctgctcaagcttcctaaagcacataaatggtgtatatacgagtggttctattcaaatatagataaaccactttttgaaggtgataatgacttttgtgtatgtctaaaggaatcttttcctaatttgaaaacaagaaagttaacaagagtagaatggggaaaaattcggcggcttatgggaa

SEQ ID NO: 175 - DNA, 659 bp, Homo sapiens
  misc_feature (1)...(659): n = a,t,c or g
tctctctttgccagtaatgttggaagtggacatttcattggcctggcagggtcaggtgctgctacgggcatttctgtatcagcttatgaacttaatggcttgttttctgtgctgatgttggcctgggtcttcctacccatctacattgctggtcaggtcaccacgatgccagaatacctacggaagcgcttcggtggcatcagaatccccatcatcctggctgtactctacctatttatctacatcttcaccaagatctcggtagacatgtatgcgggtgccatcttcatccagcagtctttgcacctggatctgtacctggccatagttgggctactggccatcactgctgtatacacggttgctggtggcctggctgctgtgatctacacggatgccctgcagacgctgatcatgcttataggagcgctcaccttgatgggctacagtttcgccgcggttggtgggatggaaggactgaaggagaagtacttcttggccctggctagcaaccggagtgagaacagcagctgcgggctgccccgggaagatgcctttcatatttttcgagatccgctgacatctgatctcccgtggccgggggtcctatttggaatgtccatcccatccctctggtactggngcacggatcaggtgaa

SEQ ID NO: 176 - DNA, 1033 bp, Homo sapiens
  misc_feature (1)...(1033): n = a,t,c or g
cccacgcgtccggatgtgtgctcacacttgggggacctgattggggcttcagaccttgggggcctgtccgcagggtctcctccatccttcttgatttgcctgtcattgaggctgcccgctctgggcgccattccccagcctaacacctcttctcagtctttccttgcaggtccctggagtccaggccttggggcagtgaagaaaccgtggggaggggcatgagatgccagtccccaaagtccttgggagcccttgtgggccaagtcattgtaggacacaccctctcctgggcattgctgaggtcacccagtgagcctaggctcccccctcctcccatccccagcctgggggaaccttcagcgtctctcctccctgtaggccccggctcagcttcccaggaacttttgttggtgggtactagtagggtaaggcagttcttcccatcatgagggagaccttgggagactttcattaccaaatccattgctgccccgaccttcctgggactgatctgggtcaccctggtctcctgatcttggagaagtcaagttcttatcccagacttgagaggttacaagcctccaggtctctggcaaagtgtggagatgatggacagccatttgtacacacaccagccagtcccttagcatatctctcttggttttgtctcaggtctgcctcagccacctccctgacgctgtcccactgtgtggatgtggtgaaggggcttctggattttaagaagaggagaggtcactcaattgggggagcccctgagcagcgataccagatcatccctgtgtgtgtggctgcccgacttcctacccgggctcaggatgtgctgcagcctcctggccactggaggggctgaccgcctgatccacctctggaatgttgtgggaagtcgcctggaggccaaccagaccctggagggagctggtggcagcatcaccagtgtggactttgacccctcgggctaccaggttttagcagcaacttacaaccaggttgcccagttttggaaggtngggga

SEQ ID NO: 177 - DNA, 335 bp, Homo sapiens
gtcaaaaacgatttcctagcaactgtggccgtgatggaaaactgtttctttggggacaagcacttcatatcatcgcaaaactcctgggtaagtggagaagattgggaatggtatttttttccttgttattaagctattagaaataaatatgcctttgctggcacataatagtactttggtacaacaggatatcctatggagtttaaaaataagtatttaaaatataacaaatctgtattagtccattctcatgctactaataaagatatacccaagactgggtaatttataaaggaaggagttttaatggcctcacagttccgtcgacgcgggcg

SEQ ID NO: 178 - DNA, 556 bp, Homo sapiens
  misc_feature (1)...(556): n = a,t,c or g
gttcacgtctgcagcagtaagatgggagctttgtccacggagcggctacagtactacactcaggaactgggggtccgggagcgcagtggccacagcgtgtccctcatcgacctctggggcctccttgttgagtatctcctgtaccaggaggagaaccctgccaagctgtctgaccaacaggaggcggtccgccagggtcagaacccttaccccatttacaccagtgtcaacgtccgcaccaacttgagtggggaagattttgcagagtggtgcgagttcacgccctatgaggttggcttccccaagtacggggcttatgttcccaccgagctcttcggctcagaactcttcatgggacgattgctgcagctccagcctgaaccccggatctgttacctgcaaggtatgtggggcagcgcctttgccaccagcctggatgagatcttcctaaagaccgccggctcgggcctcagcttcctggagtggtacagaggcagtgtgaatatcacagacgactgccagaagcctcagctgcacaacncctcgacgcgggaat

SEQ ID NO: 179 - DNA, 631 bp, Homo sapiens
gaatttctgggtcgtcccacgcgtcccgcaaaggatgagggaaacgatgagggaaaggatgagggaaaggatgagggaaaggatgagggaaaggatgagggaaaggatgagggaaaggatgagagaaaggatgagggaaaggatgagggaaaggatgagagaaaggatgagggaaaggatgagggaaaggatgagggaaaggatgagggaaaggatgagggaaaggatgagggaaaggatgagggaaaggatgagggaaacgatgagggaaaggatgagggaaaggatgagggaaaggatgagggaaaggatgagggaaaggatgagggaaaggatgagggaaacgatgagggaaacgatgagggaaacgatgagggaaaggatgagggaaaggatgagagaaacgatgagggaaaggatgagggaaaggatgagggaaaggatgagggaaaggatgagagaaacgatgagggaaaggatgagagaaaggatgagggaaaggatgagggaaaggatgagggaaaggatgagggaaaggatgagggaaaggatgagggaaacgatgagggaaaggatgagagaaaggatgagggaaaggatgagggaaaggatgagggaaaggataagtaag

SEQ ID NO: 180 - DNA, 469 bp, Homo sapiens
  misc_feature (1)...(469): n = a,t,c or g
ggcggggctcntttgagacctgatgaccatcattacgcccagcttggcacgagggggaggacttcagctacggcctgcagccctactgcgggtactccttccaggttgtgggggagatgatccggaaccgggaggtgctgccttgccccgatgactgtcccgcctgggcgtatgccctcatgatcgagggctggaacgagttccccagccggagggcccgctttaaggacatccacagccggctccgagcctggggcaacctttccaactacaacagctcggagcagacctcggggggcagaaacaccacgcagaccagctccctgagcaccagcccactgtgcaatgtgagcaacgccccctacgtggggcccaagcagaaggtcccgccctttccacagacccaggtcatccccatgaagggccagatcagacccatggtgcccccgccgcagctatacgtccccgg

SEQ ID NO: 181 - DNA, 453 bp, Homo sapiens
caggaattccgggcgccacccacgcgttcgatggatcctggaagagcgcaagcgggtgatgcaggaggcctgcgccaagtaccgggcgagcagcagccgccgggccgtcacgccccgccacgtgtcccgtatcttcgtggaggaccgccaccgcgtgctctactgcgaggtgcccaaggccggctgctccaattggaagcgggtgctcatggtgctggccggcctggcctcgtccactgccgacatccagcacaacaccgtccactatggcagcgctctcaagcgcctggacaccttcgaccgccagggtatcttgcaccgtctcagcacctacaccaagatgctctttgtccgcgagcccttcgagaggctggtgtccgccttccgcgacaagtttgagcaccccaacagctactatcacccggtcttctgcatggccatactggcccggta

SEQ ID NO: 182 - DNA, 377 bp, Homo sapiens
cataatgtatagtatttctcctgccaactctgaggaaggccaggaactttatgtctgcacagtcaaggatgatgtgaacttggatacagtacttctcctaccctttttgaaagaaatagcagtaagccaactggatcaactgagcccagaggaacagttgctggtcaagtgtgctgcaatcattggtcactccttccatatagatttgctgcagcacctcctgcctggctgggataaaaataagctacttcaggtcttgagagctcttgtggatatacatgtgctctgctggtctgacaagagccaagagcttcctgctgagcccatattaatgccttcctctatcgacatcattgatggaaccaaagagaagaaga

SEQ ID NO: 183 - DNA, 621 bp, Homo sapiens
ctcatccttaaagtgacagagtaaattaactctaaggccccatccaggactcaagctgtgtgattttacaaaaatgaaaattatattaataatcccattgtaaaatcccaaaagaaagtcaagagactagcagaaagacaggtgggtgatgggatgtcctggacagagcctggatcatgaggtccccatgtagtgcttgtactacgcagatgtttcctcttgagctattttaaaggtgtggaaaaagccaaagcaatgccctctccacggatactaaagactcacctttccactcagctgctgccaccgtctttctgggaaaacaactgcaaggtaagataccaacagctccctgtgacagaagggaaagtaagccaaccaaagcgagtcctgcagaccccaacgcagagcattcgtgatcacctttgcctctccactgtctctgatgcttaccagcaaagagaaaacataaagttctacattcagcaggacattcacctgaacagtttcaaataggacatgaaggcaggatccagattgaatgtttggagggaactagagacatggggaggcagtgagtgcagtaagcgtagctgtgaaatgaaggggagaagatggtgg

SEQ ID NO: 184 - DNA, 415 bp, Homo sapiens
accgggacgacccacgcgtccgggaatttaattctattatatatgcagactttctaaagaagataaagcttttttatgggagaaacgttattattgcttcaaacacccaaattgtcttcctaaaatattagcaagcgccccaaactggaaatgggttaatcttgccaaaacttactcattgcttcaccagtggcctgcattgtacccactaattgcattggaacttcttgattcaaagtaagtcaaatacatttatttgctcttgttttattgtcagtttttccagtaaggtatgttgccagaagtatttcctttccttttaacatgaaagcaattcaatataatccaaatgtgtaaatgtatatttatacaaacatatcttctgcattgaagttgtcaataaagcattgcatgt

SEQ ID NO: 185 - DNA, 359 bp, Homo sapiens
ggaaaatgatgatttgaggtttatttgaaatacaacaatgtccaataggaaaacactgcaactttcttcaggtgttgagaaatccaatagagacctctgcttgtctcctcctttggcaagagctccaaggggagagagaggatgggccaccacgatgaatactacaggctgcggggaaggataaccctagtccagaccattcctacaaaagaaatggggaatccgaaaggaaaaggaagaaatctcactagcacatgtcaaagagccaggagaggcacaattcaccaagcagaggaagaaatagtgaccgcagcgggggccggtgcagccgcagtgataacggtcggagccgttacagg

SEQ ID NO: 186 - DNA, 1616 bp, Homo sapiens
ggaggttgcggcggcggctgcggcgcagcccggggcggcgggtgggaagaggactaccagaggggcctgcgggagacccagggtcggacccataggagtcctgtcgtcaggacctccttgatcggtcttctgcttgggttctcggtgaaggaggagcttcggggtgtcggctgggctgcgcggactcctcttgggatccgatgatggatcccacccggtgatcgggaatggggttacaatgcagtgaggcggaaaggctctcgccggggcacagaaagatccccagggccgcaaggcgtgctgtcgcctgcaaaggcactgacccacgagcccactgcctccctccttcctgggtggagcaggggcctgccttcatctccaaggcccgggggctccggcatctcgacgcggcttccggcgacacgggcaaagagagacagaggctagtccgagccggagccagtgtgaccacacgtggcactgacgtcccccaagagcacatgcagtgagcctgtgtctctgaggccgtagtgggcgacgacgagacggacagtgatgtccaggcctgcgcccgggggccactggagacctgcccctcaaagcggaggaaacgccaagctcacctgaaaacctgcgagacagggcctgtgcacgagtccagtactcctacttcgccaagtctcagggacccatccccgagcaacggtggcggcgcagagaagagcacggcgccggcgcaggtgcagagagacaggaggctgatggggggaagttgaggcacctggggcagagaaaaaaatgcattgccaagaggtttctgggtcatctactgacgaaaatgtcttcccatcagcccttgcgctggtccccagggaccctggcatccgtcgttggcgcccagggtgcgcgtcgggccactaggggtaccccaactcggacagaaggcccatgagttgaatttgaagtttgtgggaatagaggtgaggcaccaggggcagaaaaaaaacaggagacctcgcctcagacaagcggggcctgggtcccccatggatgaaagtgccttcccattatgctgtaccctgggcagagtggacagtgacgaccctggttcgagcccagggtgcgcttcgggaccgcttgcggttaccagaaagcgaacaaatggtccatgagcggaaggtgaggcacctgaggcagagaaagtaaagaaacgcgccgccgagaagcagtgcctgggtccctcacggaggaaattgtcttctccttagcccgttcgcttggcagtgaggtccctggcgtccctggtttgatcccagggtacgcctcgggccactagtgttaccccaaggtgggcagaaagcccataaggggaaggcgaggcacctggggcagagaaaaaaaaaaacttcgccgcaaagaagcgcggcctgattccccacggacgaaagtgtcttcccatcagtccctgcactgggacccggggaccctggtgtccctggttcgagctcagggtgtgcctcagccgctacgtgcaccccaaggggagctttgggagcccaaaagccaataagggaaagtaatttttaaggcccccagtggtgaggcccctgtcacag

SEQ ID NO: 187 - DNA, 916 bp, Homo sapiens
ttttgataagaggcaacatgaagcaagaatccagcaaatggagaatgaaattcactatttgcaagaaaatctaaaaagtatggaggaaatccaaggccttacagatctccaacttcaggaagctgatgaagagaaggagagaattctggcccaactccgagagttagagaaaaagaagaaacttgaagatgccaaatctcaggagcaagtttttggtttagataaagaactgaagaaactaaagaaagccgtggccacctctgataagctagccacagctgagctcaccattgccaaagaccagctgaagtcccttcatggaactgttatgaaaattaaccaggagcgagcagaggagttgcaggaagcagagaggttcagcagaaaggcagcacaagcagccagagatctcacccgagcagaagctgagatcgaactcctgcagaatctcctcaggcagaagggggagcagtttcgacttgagatggagaaaacaggtgtaggtactggagcaaactcacaggtcctagaaattgagaaactgaatgagacaatggaacgacaaaggacagagattgcaaggctgcagaatgtactatacctcactggaagtgacaacaaaggaggctttgaaaatgttttagaagaaattgctgaacttcgacgtgaaggttcttatcagaatgattacataagcagcatggcagatcctttcaaaagacgaggctattggtactttatgccaccaccaccatcatcaaaagtttccagccatagttcccaggccaccaaggactctggtgttggccttaagtactcagcctcaactcctgttagaaaaccacgccctgggcagcaggatgggaaggaaggcagtcaacctccccctgcctcaggatactgggtttattctccc

SEQ ID NO: 188 - DNA, 1080 bp, Homo sapiens
cctctactgcagcttcatcatcagattcttctttctgttcttggggtgcttcttcttcctccatgggctcctcaacagtttcagtcttgctgctccatacataaataggaaagtttatgaactgtgaatattttttgacgagatttttaattgtatccaattcaaggtaatcagatgcttcttcttttaagacaagggtaattgtcgttccccgtcctagagtgtttcctcttgggtcagcaattacagaaaattcattggagtcagactcccagattggccagtttggtgtcggtttctattccgccttccttgtagcagataaggttattgtcacttcaaaacacaacaacgatacccagcacatctgggagtctgactccaatgaattttctgtaattgctgacccaagaggaaacactctaggacggggaacgacaattacccttgtcttaaaagaagaagcatctgattaccttgaattggatacaattaaaaatctcgtcaaaaaatattcacagttcataaactttcctatttatgtatggagcagcaagactgaaactgttgaggagcccatggaggaagaagaagcagccaaagaagagaaagaagaatctgatgatgaagctgcagtagaggaagaagaagaagaaaagaaaccaaagactaaaaaagttgaaaaaactgtctgggactgggaacttatgaatgatatcaaaccaatatggcagagaccatcaaaagaagtagaagaagatgaatacaaagctttctacaaatcattttcaaaggaaagtgatgaccccatggcttatattcactttactgctgaaggggaagttaccttcaaatcaattttatttgtacccacatctgctccacgtggtctgtttgacgaatatggatctaaaaagagcgattacattaagctctatgtgcgccgtgtattcatcacagacgacttccatgatatgatgcctaaatacctcaattttgtcaagggtgtggtggactcagatgatctccccttgaatgtttcccgcgagactcttcagcaacataaactgcttaaggtga

SEQ ID NO: 189 - DNA, 1344 bp, Homo sapiens
ttttttttttttgctgctgggtcgggttttatttcaaatgcagccacagaggcggtttctgcacaggtacgtgatccgactccacaagctcccaccaggggctccccatgacccgcaatgacgctgtgtggggtcaaaggaaaacaggccacagccaggcccctcgatggacgcaggcaggggaccaggaatgcggcccacgcagggggatcgggaatcaggcggaaggtgcaggtttgcagctggcgggaggagccagcatgccccaatctctaaaatattcccggtagaaaaatagacatttccctccaaagcagattcctggggctggagggtccctccaaggccaggggtccgggtgattccagagcatccacgctctgcgctgaaggcactgaacctgccatcactgtcacagccgtcaccggccaaggagggtctggaggagggaaggggcccttgcgaggctctggtgctggtgatcccggcccccaccaccggaggagctgaaagcccttgctcagccgctgccctgctggtgaacccggcccccaccgccggaggagctgcaccctgtgtggtctgaggcagccctgcactgggcagcggccccgccccgcgctgaacccactaggagagcagctgcagcacctgtcggatgcgctgggccctccccggcagggggggatcagagccctcctcatccagctcccgcatcagggcttccgccttctgcaccgtcagctctcgggcccggccctgcagcccctccaggtaggccagcagggtggagaagtgctcatcgggaaccttgtcactgtcatacatgtgcagcaggagccacgtctgcctcgtcttctgaaacctccagttcttgtgcttttgggcccatctgcagaggtagtccagggccagttcggcccccgagcgcctggcaggcgggtgctgggccacaaggcctgcctcccgcagacgctgcctctcctctttcttccgttcctttttcagcttcctttccaggaccctctgctcctctggggacagctctggctctgcgtccagcccgggcctgagcacagcttcgcccttggagccggctccttcgccacttggtgcagcctcagggcccagcagtggcccctctgctgacgccttcttcagctttttgttctttttctctgtcacttcaggaacttttctcttctgttttgccatcctgcgcccacctgcgcccacgtcgcccacctaagcgtgaacagctgcgtcgcggacgccgccttccggcagggacccgcggacgcgtgggtcgacccggcaaaacgggtccaacctagggcgtcgagg

SEQ ID NO: 190 - DNA, 550 bp, Homo sapiens
cccggacccacgccgcccccgcgccacggctctcccccacaccgccttattcgggtcgagaccccggggcccccggcgccgcctgctgatgagcggatctccggaccccccgccagcagcgataggctagctatcctagaagactatgcggacccgtttgatgttcaggagactggcgaaggctcagcaggagcttcaggagccccagagaaggtccctgaaaatgatggctacatggagccctatgaggctcaaaagatgatggccgagatccggggctccaaggagacagcaactcagcccttgcctctgtatgacacaccctatgagccagaggaggatggggccaccccggaaggtgagggggccccctggccccgggagtcccgcctgccagaggatgatgagaggccccctgaggagtatgaccagccctgggagtggaagaaggagcggatttccaaagcctttgcagttgacattaaggtcatcaaagacctaccttggcctccacctgtgggacagctggacagcagcccctccctgcctg

SEQ ID NO: 191 - DNA, 562 bp, Homo sapiens
caatttttttctcttttcttaaggtatcagatacacaccggacttcaacattctatcataagacctacccaacccaactgtttacctctggacaatgccaccctacctcagaaactgaaggaggttggatattcaacgcatatggtcggaaaatggcacttgggtttttacagaaaagaatgcatgcccaccagaagaggatttgataccttttttggttcccttttgggaagtggggattactatacacactacaaatgtgacagtcctgggatgtgtggctatgacttgtatgaaaacgacaatgctgcctgggactatgacaatggcatatactccacacagatgtacactcagagagtacagcaaatcttagcttcccataaccccacaaagcctatatttttatatattgcctatcaagctgttcattcaccactgcaagctcctggcaggtatttcgaacactaccgatccattatcaacataaacaggaggagatatgctgccatgctttcctgcttagatgaagcaatcaacaacgtgacattggctctaaaag

SEQ ID NO: 192 - DNA, 2171 bp, Homo sapiens
cacgcgtccggaaaggaagaggcggtgagaggctgcaaagccccttgcgtgttccgcagaaaccagaaagacctccccttccacccaagcctcagttcctaaactcaggggcatatcctcaaaaacctcttagaaatcagggagtggtgaggacactgtccagctctgcccaagaggacatcatccggtggtttaaagaggagcagctaccacttcgagcgggctaccagaaaacctcagacaccatagccccctggttccatggaattctcacactcaagaaagcaaatgaacttcttctgagcacaggcatgcccggcagttttctcatccgagtcagtgaaaggatcaaaggctatgccctgtcctatctgtcggaggacggctgtaaacatttcctcatcgatgcctctgcagacgcctacagcttcctgggcgtggaccagctacagcatgccaccttggcggatttggtggaatatcacaaggaggaacccatcacttccctggggaaggagctccttctctatccctgtggtcagcaggaccagctgcctgactacctggagctgtttgagtgacagcctccatcagggtcatcctacagcctccaagcgggctttcccctggacaaatgccactgcaacatttatgtgtgaagccaaaatcaccctgcagcagagccaatactgatcaactgaaagtatccatggagtcctcattgacacctcttttctgcacaaatactggaattcaatgtcaagagaaaatgacctctgctcaaaagggagaagagtctcaatttcagcaagtacctgtcatgaagggtatgaccttaatgatgtacataaaataaaacaaatgaagaaatggaaaacttttagaaattaaggtgtacttgaaaacgagtatctatcatatgacccctgcactccctctgtatcatctcaggaggtttcaggggcctgttgacatgaagtttcgaagtttcatgttggctttggaatggtagcaaaagcctttcctggctgagatgatgcttaaaacacacctcacttattgtacatgttggaaccaggacatgagagacatagaaaaacagaagtcatgaatgtaaattgaatgagaggcttaacatgcatgaaaatacagatggacctgcaggaaagtgagcaaacatcgctgagtttgttttcttgttcgggagaatggggccggggctggcctggcctcccctggatatactctatagtgcaccaaaaggataaagcatctgtacatgtatttttttattttttatcagaagtgcttagacaagaacagaataagcaggctgtttggatgctacttgtggttgaattgtgttcccccaaaatatatggtgaagtcttaacccccatccccgtgaatgggaccttgtttggaaatagggtctttgcagatatagtcaagatgaggtcacattggattagggtgggccccaaatccaatgactggcatccttaggagaagagagagttttggtaatagacacaaatgcagtgggaagaagaccaggggacaagaggcaagttggagtgatgcagccggaagggaagggacaccaaggatctccggccaccagcagaagccagcagagaggcatgggacaggttccccacaagccttagaaggaagcatggccctgacttcagaattccagactccagaactggaagaataaatgtctgttgttttaagctgcttagttcatgctgagttcatgctgacttgttactatagccccagaaagctaatacagtcgtttatgtaattacataacctgacacacaagatcgacccattcactgctgcccagtccaccattttcataatgaagtagaaatgggaggtaagaaaaacattccagccagttctgtttagccctgggacacatatttgtcccgtcaggaatcttatgccctcctggaacccccgcccacctcagtccagtcccagtcaggcgaacggcctctggacagggactgaggtggctttgagccactggagatcatttttcttggaggatggagattggctagtacctctggcctaactgtgtaggtcaatactcttttacattgccttctaataaaagcagaatgatacagcagtgttgttaaaaaaaaaaa

SEQ ID NO: 193 - DNA, 2095 bp, Homo sapiens
ggggaagtctggagaaggcattgtttcaattattaaaagtgtgggggcagtgggcggaacaaacgcgccgactacagaggctggacgtaagcttatcggtggcgcgcgtgcgcagcgccggcccgagttgccaaaacaaaggggatttggtgatggaggctttgttagaaggaatacaaaatcgagggcatggtgggggatttttgacatcttgtgaagcagaactacaggagctcatgaaacagattgacataatggtggctcataaaaaatctgaatgggaaggacgtacacatgctctagaaacttgcttgaaaatccgtgaacaggaacttaagagtcttaggagtcagttggatgtgacacataaggaggttggaatgttgcatcagcaggtagaagaacatgaaaaaatcaagcaagagatgaccatggaatataagcaggagttgaagaaactacatgaagaattatgcatactgaagagaagctatgaaaagcttcagaaaaagcaaatgagggaattcagaggaaataccaaaaatcacagggaagatcggtctgaaattgagaggttaactgcaaaaatagaggaattccgtcagaaatcgctggactgggagaagcaacgcttgatttatcagcaacaggtatcttcactggaggcacaaaggaaggctctggctgaacaatcagagataattcaggctcagcttgtcaatcggaaacagaaattagagtctgtggaactttctagccaatcagaaattcaacacttaagcagtaaactggagcgggctaatgacactatctgtgccaatgagttggaaatagagcgcctcaccatgagggtcaatgacttggttggaaccagtatgactgtcctacaggagcagcagcaaaaagaagaaaaattgagggaatctgaaaaactattagaggctctgcaggaagaaaagagagaattgaaggcagctcttcagtctcaagaaaatctcatacatgaggccagaatacaaaaggagaagttacaagaaaaagtaaaggcaactaacactcaacatgctgtagaagctataagtttggaatctgtgagtgcaacgtgtaaacagctgagccaagaactaatggaaaaatatgaagaactgaagaggatggaagcacataacaatgaatacaaagcagagattaagaagttgaaagaacagattttacagggtgaacaaagttacagttctgcactagaaggaatgaagatggaaatctcccatctaactcaggagttacatcagcgagatatcactattgcttccaccaaaggttcttcctcagacatggaaaagcgactcagagcagagatgcaaaaggcagaagacaaagcagtagagcataaggagattttggatcagctggagtcactcaaattagaaaatcgtcatctttctgaaatggtgatgaaattggaattgggtttacatgagtgttccttgcctgtatctccccttggttcaatagctaccagatttttggaagaggaggaactgaggtctcatcacattctagagcgcttggatgcccatattgaagaactaaaaagagagagtgaaaagacagtgagacaattcacagccttaaagtagcctcttaaaaaaatcacaatcttggaaataaaaataaacaccaaagagttactgtcatctgaagtagcagctctttaaaaacatgaagagataaaattataaaaatgatacatctaaagcagtggtgaagaaagctgaaaaactgatacttttgataggcattttctctgcactggtttttttaaaggacttcttccagcaataagttgaaagaataaaccactttgctagacttttttctcatacgaatatttattatcataaagtgatacttaccttgctgacttaaatgtgaatagctatgtactaattgaaataaggattttatgatacatgttgaaaataaagtaactgcaggaactttctttaggggaaatgtgtagaagcatggatttaggggtcaaacatacctggatcgatagactggttttgccacttaccagccaacggggctt

SEQ ID NO: 194 - DNA, 1051 bp, Homo sapiens
gagaccttgtcttaaaaaaataaaatgctgtcagaataaaaagcagtcaacagaaatgaaacccttataagagacaaataaatgtgggcaattattttctgcaaaatgccctccaagcccctgggcgccattgccttctgtaataggacatcacctgaacaggctttctgggctggagccaaggaccctccctgactcccacctccctttctgccttgtaccccagccaggtggaagagaccggagtggtgctgtccctggagcaaacggagcaacactctcgcagacccattcagcggggcgccccctctcagaaggacacccctaaccctggggacagccttgacacccctggcccccggatccttgccttcctgcacccgccttccctgagcgaggctgccctggccgctgacccccgccgtttctgcagccctgacctccgtcgcctcctgggacccatcctggatggggcttcagtagcagccactcccagcaccccgctggccacacggcacccccaaagtcctctttcggctgatctcccagatgaactacctgtgggcaccgagaatgtgcacagactcttcacctccgggaaagacactgaggcagtggagacagatttagatatagctcaggatgctgatgctctggatttggagatgctggccccctacatctccatggatgatgacttccagctcaacgccagcgagcagctacccagggcctaccacagacctctgggggctgtcccccggccccgtgctcggagcttccatggcctgtcacctccagcccttgagccctccctgctaccccgctgggggagtgacccccggctgagctgctccagcccttccagaggggacccctcagcatcctctcccatggctggggctcggaagaggaccctggcccagagctcaaaggacgaggacgagggagtggagctgctgggagtgagacctcccaaaaggtcccccagcccagaacacgaaaactttctgctctttcctctcagcctgagtttccttctgacaggagg

SEQ ID NO: 195 - DNA, 423 bp, Homo sapiens
gtgaactccaagactgttttgatgttcatgatgcatcttgggaagagcagatattctggggatggcataatgatgtccacatatttgacacaaagacacagacttggtttcaaccagaaattaaaggtggagttccaccacagccacgagccgcgcatacgtgtgcagttcttggaaataagggttatatctttggcggacgtgttctgcaaactaggatgaatgatttgcactatctaaacctagacacctggacttggtctggaaggattactattaatggagaaagcccaaaacatcggtcatggcatactttaacacctatagctgatgataaacttttcctatgtggtggactaaatgcatataatatgccattaagtgatggttggattcataatgtcacaacacattgttggaaac

SEQ ID NO: 196 - DNA, 411 bp, Homo sapiens
ttttttttttttgaggacaaggtctcactctgtcaccccaaggtgggagtgcagtgacgacatcacagctcactggcagcctcaaccctggggttcaagtgatcctctcaccttcagcctccccaagtagttgtgcctcctaggcacacaacactatgccccggcaaatttttttgtattttgtattttttgtagaaacaggatttcgccatgttggccaggctggtctcgaacaccctgggctcaactgatccgcctgcctcggcctcccaaagtgctgggattacaggtgtgagccaccctgctcaaccaggttttattatttaagttagttaaactttggatagattgtataatatatagtttaatgtaatcatgctcatattttttaaataaataaaacactatact

SEQ ID NO: 197 - DNA, 751 bp, Homo sapiens
cccacgggaagggcaggtgaagcaggggctgctgggggattgctggttcctgtgtgcctgcgccgcgctgcagaagagcaggcacctcctggaccaggtcattcctccgggacagccgagctgggccgaccaggagtaccggggctccttcacctgtcgcatttggcagtttggacgctgggtggaggtgaccacagatgaccgcctgccgtgccttgcagggagactctgtttctcccgctgccagagggaggatgtgttctggctccccttactggaaaaggtctacgccaaggtccatgggtcctacgagcacctgtgggccgggcaggtggcggatgccctggtggacctgaccggcggcctggcagaaagatggaacctgaagggcgtagcaggaagcggaggccagcaggacaggccaggccgctgggagcacaggacttgtcggcagctgctccacctgaaggaccagtgtctgatcagctgctgcgtgctcagccccagagcaggtgaggcacgtggccagcatgggagggctgcagccagcgtgccccccactgccaggcctcaggcacactgtagctttttatgtgactggctacacagccctgtcaggactaagtgggaagaagtaagcttgttctcaagggtggtgtcctcagtttgtgaccttcccctgctgtcctcttccagagggacgtggcccttctctcccctgaccagtcctttccactagtgcgaggcaggg

SEQ ID NO: 198 - DNA, 636 bp, Homo sapiens
gggccgagtgtctggaggcctctattgcccgatatgcccaccgtgtcgccaatagccgttatacctttgacggtgaaaccgtgacgctttcgccaagtcagggcgttaaccagctgcacggcgggccggaagggttcgacaaacgtcgctggcagattgtgaaccagaacgatcgtcaggtgctgtttgccctgagttcagatgatggtgatcagggcttcccgggtaatctcggcgcgacggtgcaatatcgtctgaccgacgataaccgtatctccattacttatcgcgccacagttgataaaccttgcccggtgaatatgactaatcacgtctatttcaatcttgacggcgagcagtctgacgtgcgcaatcacaagttgcagattctggcggacgaatatctgccggttgatgaaggcggcattccgcacgacggcctgaaatctgtcgccggaacgtcttttgatttccgcagcgccaaaatcatcgccagtgagtttcttgccgacgacgatcagcgcaaagtgaaaggttacgatcacgcattcttgttacaggccaaaggcgatggcaagaaagtggcggcgcatgtctggtcagcagatgaaaaattgcagctgaaggtctacacca

SEQ ID NO: 199 - DNA, 690 bp, Homo sapiens
aaagtggcagtgtttcttctgaaattctcaggcagtcagactgtcttaggcaaatcttgataaaatagcccttatccaggtttttatctaaggaatcccaagaagactggggaatggagagacagtcaagggttatgtcagaaaaggatgagtatcagtttcaacatcagggagcggtggagctgcttgtcttcaattttttgctcatccttaccattttgacaatctggttatttaaaaatcatcgattccgcttcttgcatgaaactggaggagcaatggtgtatgacaagccgccgaaatttgccatgtcacgagagcaaatgtcacagtcatgttctcacacggcacataatgcaagtctgttgacagatgcgggtccattgtcatgtggggagtcgagggcgagctgtttgtttttgtaacgatgttgggaagtgatggctctgcagtcacaaagagcagccttctctcactggctgcaccgatgaacattacgaagttctagaacaaacatcacttcaaaatgcctggagtaattcctcttatatcaactaatttcaagaagaaaacctgcagaaactaaccccacccctctcaacgagaatattgtgtccacgtcctctttacttatacgacccgtctcttattctcttataacacaacgtcataactaaacgagcacaacac

SEQ ID NO: 200 - DNA, 433 bp, Homo sapiens
gtgactccaaggaaccaagactgcagcagctgggcctcctggaggaggaacagctgagaggccttggattccgacagactcgaggatacaagagcttagcagggtgtcttggccatggtcccctggtgctgcaactcctctccttcacgctcttggctgggctccttgtccaagtgtccaaggtccccagctccataagtcaggaacaatccaggcaagacgcgatctaccagaacctgacccagcttaaagctgcagtgggtgagctctcagagaaatccaagctgcaggagatctaccaggagctgacccagctgaaggctgcagtgggtgagcttccagagaaatctaagctgcaggagatctaccaggagctgacctggctgaaggctgcagtgggtgagcttccagagaaatctaagatgcaggagag

SEQ ID NO: 201 - DNA, 782 bp, Homo sapiens
  misc_feature (1)...(782): n = a,t,c or g
gaagaaggggaaaagaggctccaggccccttctccaatcactccctgccaccctttctcctttggattccttggctgctttagcaggtcttcctagaggctaactttgatctttcttgctgcagtttctttttgggagagctagtcagtcccacagagtggtatccctagaagggagaagtaaggattgccctcttctttaaaatgaaagccagctatttttcacgccctttaactgcaggtctgctctattttcttttctctctctggagctgagagtcagagggcccttctcctcctcctttcagcccccaacactaagctgatggattgataaatacctcagcccctcgcctttctcaacccacctggcaagtcttcttaggatctgatcccagttttctggaagcaatcctaccccagcccattcttcccagagtcgagccttaatccttctcacttctcagtgtcagagcagaaatgaatcctggggttgactgtgtccattcgggttattagcagctaagaagcccagacgagtagtgtgagctgccttgggagcctcagtgagggcactgggactggcctcactctcttgcccccagcctagtgggctttctcctctgtctctccggtggccccaggcaatcgactgcatcacgcanggacgtgagttggagcggccacgtgcctgcccaccagaggtctacgccatcatgccgggctgctgggcagcggagccccagcaacgccacagcatcaaggatgtgcacgcccgctgca

SEQ ID NO: 202 - DNA, 714 bp, Homo sapiens
ttcgagaccctatccatgaggggaattcctcacatgctggctttggggccacagcagctgctggcccaggatgaggagggggacacgctccttcacctgtttgcggctcgggggctgcgctgggcggcatatgctgcggctgaggtgctccaggtgtaccggcgtcttgacattcgtgagcataagggcaagacccctctcctggtggcggctgctgccaaccagcccctgattgtggaggatctgttgaacctgggagcagagcccaatgccgctgaccatcagggacgttcggtcttgcacgtggccgctacctacgggctcccaggagttctcttggctgtgcttaactctggggtccaggttgacctggaagccagagacttcgagggcctcaccccgctccacacggccatcctggcccttaacgttgctatgcgcccttccgacctctgtccccgggtgctgagcacacaggcccgagacaggctggattgtgtccacatgttgctgcaaatgggtgctaatcacaccatccaggtgagcggggatgtgggcggtcagaccctgggagattgtgtggaatggggccacttggatgtccgggagctccaggcaaatgctgactttgcctcttccttgctgcgtgcccttgaacatgttacttcacttctctgtgccttaagggttttttgcttgtttctttgtcagtta

SEQ ID NO: 203 - DNA, 477 bp, Homo sapiens
cggacgcgtgggcggacgcgtgggtggggaccaagatggcggaccttgattcgcctccgaagctgtcaggggtgcagcagccgtctgagggggtgggaggtggccgctgctccgaaatctccgctgagctcattcgctccctgacagagctgcaggagctggaggctgtatacgaacggctctgcggcgaggagaaagtggtggagagagagctggatgctcttttggaacagcaaaacaccattgaaagtaagatggtcactctccaccgaatgggtcctaatctgcagctgattgagggagatgcaaagcagctggctggaatgatcacctttacctgcaacctggctgagaatgtgtccagcaaagttcgtcagcttgacctggccaagaaccgcctctatcaggccattcagagagctgatgacatcttggacctgaagttctgcatggatggagttcagactgctttgagga

SEQ ID NO: 204 - DNA, 706 bp, Homo sapiens
gcggtggaattccgggttccccgttctggttcggcatatctctacagctatgtcactgtgggtgaactctgggccttcaccactggctggaacctcatcctctcctatgtcattggtacagccagtgtggcccgggcctggagctctgcttttgacaacctgattgggaaccacatctctaagactctgcaggggtccattgcactgcacgtgccccatgtccttgcagaatatccagatttctttgctttgggcctcgtgttgctgctcactggattgttggctctcggggctagtgagtcggccctggttaccaaagtgttcacaggcgtgaaccttttggttcttgggttcgtcatgatctctggcttcgttaagggggacgtgcacaactggaagctcacagaagaggactacgaattggccatggctgaactcaatgacacctatagcttgggtcctctgggctctggaggatttgtgcctttcggcttcgagggaattctccgtggagcagcgacctgtttctatgcatttgttggtttcgactgtattgctaccactggagaagaagcccagaatccccagcgttccatcccgatgggcattgggatctcactgtctgtctgctttttggcggattttgctgtctcttctgcactcaccctgatgatgccttactaccagcttcagcctgagagccctg

SEQ ID NO: 205 - DNA, 852 bp, Homo sapiens
ggcttccatcctaatacgactcactatagggctcgagcggccgcccgggcaggtgctgggtcgtttgtgggcgaagtaagtgctgtagataaagactttgggccaaatggagaagtaaggtattcttttgaaatggtgcagccagattttgagttgcatgccatcagtggggaaattacaaatactcatcagtttgacagggagtctcttatgaggcggagagggactgctgtgtttagctttacagtcatagcaacagatcaggggatccctcagcctctcaaggatcaggccactgtacatgtttacatgaaggatataaatgataatgctcccaaatttttaaaagacttttaccaagctacaatatcagaatcagcagccaatctgacacaagtgttaagagtatctgcctcagatgttgatgaaggtaataatggacttattcactattctataataaaaggaaatgaagaaagacagtttgctatagacagtacctctggtcaggtaacactaattggcaaattagactatgaagcaacacctgcctattcccttgtaattcaagcagtggattcagggacaatccccctcaattcaacgtgtactttaaatattgatattttagatgaaaatgacaatacccctttctttccctaaatcaacacttctttgttgatgttttggaaaacatgagaattggtgaactcggggcctctggtactgcaactgattcccgattcaggtgacattgctgatttatattacaagtttactgggactaaacacccccccggaacttttagcattagccccaaacacttgggagtatttttcttggcccaaaaa

SEQ ID NO: 206 - DNA, 361 bp, Homo sapiens
ctggtgattgctatgacctgtatggaggggagaagtttgccactttggctgagttggtccagtattacatggaacatcatgggcaattaaaagagaagaatggagatgttattgagcttaaaaatcctctgaactgtgcagatcctacttctcaaaggtggtttcatggacacctctctggaaaagaagcagagaaattgttaactgaaaaaggaaagcatagtagctttcttgtacgagagagccagagccaccctggagattttgttctctccgtgtgcaccggtgatgacaaaggagagagcaatgacggcaagtctaaagtgactcatgtcatgattcactgtcaggaactgaaatc

SEQ ID NO: 207 - DNA, 2483 bp, Homo sapiens
ataaaatggacatagtagtaggacttacctcccagggctgtggttatagaggttttgtaagaattaaatgacatcatccatgtaaagcatatagcagaatgcctggcacatagatgcccttagtgaatttttgctgttgttgtgattcttttgggagcagtcatagtaacatattctcatatgttggtatgttctttcatattgcattgtcttatgaatagattctggaaaccaaaatggaggaaatgatgataagactaagaatgctgagaggaactatttaaatgttttacctggggaattttatattacacggcattctaatctctcagaaatccatgttgctttccatctctgtgtggatgaccatgtgaaatcgggaaacatcactgctcgtgatcctgccattatgggactccgaaatatactcaaagtttgctgtacccatgacatcacaacaataagcattcctctcttgctggtacatgatatgtcagaggaaatgactataccctggtgcttaaggagagcggaacttgtgttcaagtgtgtcaaaggtttcatgatggaaatggcttcatgggatggaggaatttctaggacagtgcaatttctagtaccacagagtatttctgaagaaatgttttatcaacttagtaacatgcttccccagatcttccgagtatcatcaacactcactctgacatccaagcactaaacccttatagattgacatgctggcagaagatgattgttaaactctccaggaacttgtgctatgctgggaatctgtcaagcaaaagatgcccagaaagagaacttgcagctcaatccacaaatcaagatacatgtgtgtgaaacccattccaaaaatttatatactggcacaaactggtggatcaacccctaacttaaacacttaaagtctctttatgaatttctctttttttcttctctgtgttacctgtggaatattaggtaatctaaaactttttatttattcacacagggacacttggggggaaagggaaacttgattatatttacatgggagggcatttgacttttttcaaggagggcttggacttcgtcttcaggtggcaatccttaattaaacatacaaacaaaattttccttttactttctttgccaaaacaaaatgtaaaagcactgaaatatacattgcaagtacaaatttcctgtgaaaatctttttatagaaacacaaatgtataagacaaatgtgcttgttcttttaaattctcctgtttcagaatctctttttaatctactcctaaggatgtacaagttagagtcagaagacgttttggattttttccctctctctcatcctcccgctgtgcccttgcacttgcatattaataacatttcatggactgggaaatagtgttcttttttgcaagcttgatgtcaagttagtctaaaccagcacctggcagtattttagtgctcatcaacattgtgacaatcacacaaggaagatcatttctacatttctgtcctccctgcgttctcagcttgcttaaccattcctctacctcttgcatttttttgcggataaatgtatccccatttctgcttctctgtttcccctccttttccattgtttttccttatggtactactttctcaggtgctacatatcatatatttgtcccatctataacatatttaaatgctataagtagtaactccattaaacaaaggcatttacaaaagcacacaggtgtttagaaaagcaatagtttcatcaattccaagttatgtggatattgtaactggccacaagaatgaaatggagggcatttggtgtcataagatggcatgtcttgatgacaagaaacaaaacgcccttcattaatatgcctcagtgtaataactattatagaaactgttggcaagcagagtgctttcctataacagaatgtgtcttaattttctacttgagggaaaggtttgtccaggtaacaacactaaagacaaccctaagaacacccactccagcagtatgtccattagacactaaaactctccaaattatttgtcagggagcctggcgattctgccaagaaggcaggtgttttgcccttagagcctatacagttctcttggagaaattgtctttcaggcaccactgttaatcactgagactgattctaatgcaaagcagggaagacagaggcagaaaccaggagagtggtagatcagtgcagcccagatatcggaatggaggagcaaagtttcattcacggatgtttgttgaatgctgctgcccaactcttcctttgtcacctctaggctattccactaagttacttataaactggtggctttaactgagggctgtgtaaaggtactatttggcatgtgaagtcaggataaatttatcgaatgtccgttttccacatgcaactgtgttacagaagtagtaaaattggaagaatcatgtttatggtgttacca

SEQ ID NO: 208 - DNA, 366 bp, Homo sapiens
caagcatcctgcccgccctgctggtgaccatcctgatcttcatggaccagcagatcactgccgtcattgtcaaccggaaggagaacaaactgaagaaggctgccggctaccatctggacctgttctgggtgggcatcctcatggctttgtgctcctttatggggctcccctggtacgtggctgccacggtcatctccatcgcccacatcgacagcctcaagatggagacagagaccagtgcccctggggagcagccccagtttctgggagtcagggaacagagagtaaccggcatcatcgtcttcatcctgacgggaatctctgtcttcctggctcccatcctaaagtgtatccccctgccggtgc

SEQ ID NO: 209 - DNA, 574 bp, Homo sapiens
cggcgcttcacgcgtagaggcaggcagtgcgaatggaatgctcattgatggtggtagccagatagtaaaagttcaagggcacgctgatggtacaacgataaataagtctggctctcaggacgtagtacaaggaagtctggcaacgaacacaaccataaatggtggtcgccagtatgttgaacagagcacagtagaaacaacaaccattaaaaatggcggtgagcaaagagtatatgagagccgtgcgctggacacgacgattgaaggcggaactcagtctctgaatagtaagtcaacggcaaaaaatacgcatatctattctggtggcacgcaaattgttgataacaccagcacctcggatgttattgaagtttattctggtggcgtgcttgatgttaggggtggtacggcaacaaatgttacccagcacgatggtgcaattttaaaaactaacactaacggtacgacggtgagcggtacgaatagtgaaggtgcattctccatccacaatcacgtggcagacaatgtgttgctggaaaacggtggtcatttagacataaacgcatatggttcg

SEQ ID NO: 210 - DNA, 383 bp, Homo sapiens
  misc_feature (1)...(383): n = a,t,c or g
tttttctcttccatccagctgactgatgatcagggccccgtcctgatgaccactgtagccatgcctgtgtttagtaagcagaacgaaaccagatcgaagggcattcttctgggagtggttggcacagatgtcccagtgaaagaacttctgaagaccatccccaaatacaaggtaatgaatgacctaatccctgaaatcaaagcaacagagatgcccagagccttgttttcacaaagttcaggcttcaaactctactttggagcgatgtttttgctcaccactattacagcctgttagcttgtctttataccatctgcacagttatttaaaaggnnnnnnnnnnattatttacaaggactggctgtttttcttatttacctcct

SEQ ID NO: 211 - DNA, 592 bp, Homo sapiens
tttcgtgttcaggaactggcaccaatgcgtgttacatggaggacatgagcaacattgacctggtggagggcgacgagggcaggatgtgcatcaacacagagtggggggccttcggggacgacggggccctggaggacattcgcactgagttcgacagggagctggacctcggctctctcaacccaggaaagcaactgttcgagaagatgatcagtggcctgtacctgggggagcttgtcaggcttatcttgctgaagatggccaaggctggcctcctgtttggtggtgagaaatcttctgctctccacactaagggcaagatcgaaacacggcacgtggctgccatggagaagtataaagaaggccttgctaatacaagagagatcctggtggacctgggtctggaaccgtctgaggctgactgcattgccgtccagcatgtctgtaccatcgtctccttccgctcggccaatctctgtgcagcagctctggcggccatcctgacacgcctccgggagaacaagaaggtggaacggctccggaccacagtgggcatggacggcaccctctacaagatacaccctcagtaccc

SEQ ID NO: 212 - DNA, 2166 bp, Homo sapiens
tttcgttgcaattgcaacgaatggtgttgtgcctgctggtggctcctactacatgatttccaggtctctgggcccagagtttgggggtgccgtgggcctctgcttctacctgggcactacctttgcaggagccatgtacatcctgggcaccatcgaaatcctgctggcttacctcttcccagccatggccatcttcaaggcagaagatgccagtggggaggcagcagccatgctgaacaacatgcgtgtttacggcacctgtgtgctcacctgcatggccactgtggtgtttgtgggtgtcaagtatgtcaacaagtttgcccttgtcttcctgggttgtgtcatcctctccatcctggccatctatgctggggtcatcaagtctgccttcgacccacccaacttcccgatctgcctcctgggtaaccgcacgctgtctcgccatggctttgatgtctgtgccaagctggcttgggaaggaaatgagacggtgaccacacggctatggggccttttctgctcctctcgcttcctcaacgccacctgtgatgaatacttcacccgaaacaatgtcacagagatccagggcatccctggtgctgccagtggcctcatcaaagagaacctctggagctcctacctgaccaagggcgtgattgtggagaggagtgggatgacctcggtgggcctggccgatggcactcctatcgacatggaccacccttatgtcttcagtgatatgacctcctacttcaccctgctggttggcatctacttcccctcagtcacagggatcatggctggttctaaccgctctggggacctgagggatgcccagaagtcaatccccactggcaccatcctggccatcgccaccacctctgctgtctacatcagctccgttgttctgtttggggcctgcattgagggggtcgtcctgcgggacaagtttggcgaagctgtgaatggcaacctcgtggtgggcactctggcctggccatctccatgggtaattgtcatcggatccttcttctccacctgtggggctgggctgcagagcctcacgggggccccacgcctgctgcaggccatctcgagggatggcattgtgcccttcctgcaggtctttggccatggcaaggccaatggagagccgacctgggccctgctcctgactgcctgcatctgcgagattggcatcctcattgcatccctcgacgaggtggcccccatcctctctatgttcttcctgatgtgctacatgtttgtgaatctggcctgtgcagtgcagacgctgctgaggacacccaactggaggccacgctttcgatattaccactggaccctctccttcctgggcatgagcctctgcctggccctcatgttcatctgctcctggtattatgcactggtagccatgctcattgctggactcatctacaagtacattgagtaccgtggggcaaagaaggagtggggcgatgggatacgaggtctgtctctcagtgcggctcgctatgccctcttacgcctggaggaagggcccccacacaccaagaactggaggccacagctgctggtgctggtgcgtgtggaccaagaccagaatgtggtgcacccccagctgctctcactgacctcccagctgaaggcagggaagggcctgaccatcgtgggctctgtccttgagggcacctttctggaaaatcatccacaggcccagcgggcagaagagtctatcaggcgcctgatggaggcagagaaggtgaagggcttctgccaggtggtgatctcctccaacttgcgtgatggcgtgtcccatctgatccagtctgggggcctcggggggctgcagcacaacactgtgcttgttggctggccccgcaactggcgccagaaggaagatcatcagacgtggaggaacttcattgagctggtccgggaaaccacagctggccacttagccctgctggtcaccaagaacgtttccatgtttcctgggaaccctgagcgcttctctgaaggcagcatcgaccgttgggggattgggcacgatggaggcatgctcatgctggtgcccttcctgctgcggcaccacaaggtctggcggaagtgcaagatgcgtatcttcactgtggcccagatggttgacatgcatgccatgag

SEQ ID NO: 213 - DNA, 392 bp, Homo sapiens
  misc_feature (1)...(392): n = a,t,c or g
ttctatctgaggctactgtcttttttctgctttcaggagcatgagaagaggtgttggagcgttgactttaatttgatggatcctaaactcttggcttcaggttctgatgatgcaaaaggtactgtttgaatctctttctcagcacctccttctccctggccctcttaactgtaattcctttcatcggcagaaatacaaatatttactcaaactcatgtcagtcctttgtgattactgattattattattccccannnnnnnnnnnnnnnnnnnnnnnnnnnnnnnnnnnnnnnnnnnnnnnnnnnnnnnnnnnnnnnnnnnnnnnnnnnnnnnnnnnnnnnnnnnnnnnnnnnnnnnnnnnnnnnnnnnnnnnnnnnnnnnnnnnnnnnnnn

SEQ ID NO: 214 - DNA, 425 bp, Homo sapiens
ggcggaattcaaaagcaatgcacaggtcttcctgtgacgggccgctactctctctgccctcagtgggacggtcagccacccatgccctggtccaggcccagctgatctgctcaggagccaggcggggcatgcacgcttttattgtgccaatccggagtcttcaggaccacaccccactgccaggtaagcccataatgctccctcaaggaaccctgccaggaggagagcccaggtggcctccctgacctggggccccagagggccacaggagtagctaagacatgtctcccttgggcagggagcggtccagttggacagacttggtgctaactggctaggtgaacttgagcaagatttagcatctttctgacctcagcttgttcacctgcaaaataggtacaataatcccagtgtcacaggctgct

SEQ ID NO: 215 - DNA, 608 bp, Homo sapiens
ctgcgggaccctcatcttgcaggcccgggcctatgtgggaccgcacgtcctggcagtggtgacccgcacagggttctgcacggcaaaagggggcctggtgagctccatcttgcacccccggcccatcaacttcaagttctataaacacagcatgaagtttgtggctgccctctctgtcctggctctcctcggcaccatctacagcatcttcatcctctaccgaaaccgggtgcctctgaatgagattgtaatccgggctctcgacctggtgaccgtggtggtgccacctgccctgcctgctgccatgactgtgtgcacgctctacgcccagagccgactgcggagacagggcattttctgcatccacccactgcgcatcaacctggggggcaagctgcagctggtgtgtttcgacaagacgggcaccctcactgaggacggcttagacgtgatgggggtggtgcccctgaaggggcaggcattcctgcccctggtcccagagcctcgccgcctgcctgtggggcccctgctccgagcactggccacctgccatgccctcagccggctccaggacacccccgtgggcgaccccatggacttgaagatgt

SEQ ID NO: 216 - DNA, 858 bp, Homo sapiens
ctatctggtcactggccactgtggctttgtattcctctaacgtggctgccaaggctgcttttcctttctgctcagactcaataattcgctccatatggtgactgcgttctttgagtgcccctatcatttcttgagcttccttattgtcttgttctgccattttcaaagtattgcttaaatgctgctggacaccaagaagctgctcccgttcaaaacgggcattctcagcgaggtccatgtaacgttgctctaattccatatagcgcccactttttacatcttcatctatgacagattgaatacttccgctctcttctagatgagcatcacatttcttatgtcatagatgaagatgtaaaaagtgggcgctatatggaattagagcaacgttacatggacctcgctgagaatgcccgttttgaacgggagcagcttcttggtgtccagcagcatttaagcaatactttgaaaatggcagaacaagacaataaggaagctcaagaaatgataggggcactcaaagaacgcagtcaccatatggagcgaattattgagtctgagcagaaaggaaaagcagccttggcagccacgttagaggaatacaaagccacagtggccagtgaccagatagagatgaatcgcctgaaggctcagctggagaatgaaaagcagaaagtggcagagctgtattctatccataactctggagacaaatctgatattcaggacctcctggagagtgtcaggctggacaaagaaaaagcagagactttggctagtagcttgcaggaagatctggctcatacccgaaatgatgccaatcgattacaggatgccattgctaaaggtagaggatga

SEQ ID NO: 217 - DNA, 399 bp, Homo sapiens
agcacgctaccgctttaccctcagcgccaggacgcaggtgggctctggggaagccgtcacagaggagtcaccagcacccccgaatgaagctactccaaccgcagctcctcccacattgcccccgactaccgtgggtgcgacgggcgctgtgagcagtaccgatgctactgccattgctgccaccaccgaagccacaacagtccccatcatcccaactgtcgcacctaccaccatggccaccaccaccaccgtcgccacaactactacaaccactgctgccgccaccaccaccacggagagtcctcccaccaccacctccgggactaagatacacgaatccgcccctgatgagcagtccatatggaacgtcacggtgctccccaacagtaaatgggccaa

SEQ ID NO: 218 - DNA, 662 bp, Homo sapiens
ctgaagtcaacgcaagacgaaatcaaccaggcaaggagcaaactgtcccagctgcatgaaagccgccaggaggcccacaggagcctggagcagtatgaccaggtgctcgatggagcccatggtgccagcctgaccgacctggccaacctgagcgaaggcgtctccctggcagagaggggcagttttggagccatggatgatcctttcaaaaataaagccttgttatttagcaacaacacgcaagagttgcatccggatcctttccagacagaagaccccttcaaatctgacccatttaaaggagctgaccccttcaaaggcgacccgttccagaatgacccctttgcagaacagcagacaacttcaacagatccatttggaggggaccctttcaaagaaagtgacccattccgtggctctgccactgacgacttcttcaagaaacagacaaagaatgacccatttacctcggatccattcacgaaaaacccttccttaccttcgaagctcgacccctttgaatccagtgatcccttttcatcctccagtgtctcctcaaaaggatcagatccctttggaaccttagatcccttcggaagtgggtccttcaatagtgctgaaggctttgccgacttcagcactattgaaggtcgacgcggccg

SEQ ID NO: 219 - DNA, 752 bp, Homo sapiens
cggacgcgtgggggatctggcaatagctcccaaccctcacttcgtgagggccacgacaaacctgtttttaatggagctggaaagcctcattccagcacctcttcaccaagtgtcccaaagacttctgctagcaggactcagaaatctgctgttgagcacaaagccaaaaaatctctgtcccatcctagccattccaggcctgggcccatggtcaccccacacaataaggctaagagtccaggtgtcaggcagccaggcagcagctctagctcagcccctgggcagcccagcacaggggttgctcgacccacagttagttctggccctgtgcctaggcgccagaatggcagctccagctcaggacctgagcgatcaatcagtgggtccaagaagccaaccaatgactcaaatccctctaggcggacagtcagtggtacatgtggccctggacaacctgcaagcagctcaggtggccctgggcgacccatcagtggttcagttagttctgcaagacccttgggcagctctcgtggccctggccggcctgtgagcagtccacatgaacttcgacgaccagtgagtggcttgggccccccggggcggtctgtcagtggccctgggagatccataagtggctcaattccagctggacggactgtcagtaattcagtcccaggaagaccagtgagcagcttgggacctgggcaaacagttagtagctcaggtcccactataaagcctaagtgcactgt

SEQ ID NO: 220 - DNA, 582 bp, Homo sapiens
ttattattattttgcatagagacaagcactcactgtgttacccaggctggttttgaactcctgagcttaatcagttctcacctgctttgccctcccaaagtgctatgattacaggtgtgagccaccacgcttggccctgcccaggagtcatttttgtatctacaggtatcttcctatgctgtagacagatgccctttttcaaggcaaaaaccctagccatttttctcttctccttcagagtctgcaacatcctctcaactcatccaagtgactactgcctggtgctcttggggatgcagggaggcctgagaaggccaatgtctatacagaaagttctaacatagtgcactgagtcaatgtgggcactttaaagccctttcacctgccaagtcacgaagcacccctatagttgtgtttgtaaaatactggggggtttgaaggggaaaagggataactccaaggtaccatctttgcatttcagatccacacaacttaaagatctgctgtcgagtgaatggggaagtggtccagagcagcaacaccaaccagatggtattcaagacagaggacctgatagcctgg

SEQ ID NO: 221 - DNA, 440 bp, Homo sapiens
ggaattcgatcagtagaagtttgggggatatagaaacgaaggttttctaacttttagctttcaaggagattgtccggttgggaaagcaagatatgaaaaataaatatgtcaagaatataatccaaaacaatctaattaagtgctagaagtttgccatggacagacaaagtgctacttgggaaggaagttccagaaacaccacagctgggtacattcttcaccactctgagtggtggcagtgacgcgttggctttgtgagaatggtgtgtcttacttgagaaagtgtgtgtgttctgcctgcaggcatgggactcgctgtgctggagaagtggcagccgctgcaaacaattcgcactgcacagtcggaattgctttcaacgccaagatcggaggtatgggaaaccaactcacgtggatgtagaaatgcgccagttagctct

SEQ ID NO: 222 - DNA, 489 bp, Homo sapiens
ccgacgatttcgtgaggcggcagccaggtggggttccagccagagcacgcacgcacggagccgggagcatgcagcctgcactgcgggggatgtgatgctcggctctaactcgcctggctggcccgccacggacgcctcagcttgcaaccatggtaacgtttctggcgggggacacccccgggagcccaccgcgatgggcagcctcctggtgactgatggacgagtgtccacctcccagaccgagagcgcttagtaggtcggaggaagtggagaggatgtaacacgcccccagccgggagtgaagccctgaggagctcctccccccttcgttcccaccctcaagtctgacgatgacacctccaattttgatgaaccaaagaagaattcgtgggtttcatcctctccgtgccagctgagcccctcaggcttctcgggtgaagaactgccgtttgtggggttttcgtacagcaaggcactggggattcttgg

SEQ ID NO: 223 - DNA, 493 bp, Homo sapiens
tttcgtcgagcgccttgcgcacctccacgctgcctgcgccccgcgccgcaaggtggcgctcctcttggaggtgtgcagagatgtctatgcgggcctggctcgaggcgagaaccaagatcccctgggggccgacgccttcctgccggcgctgaccgaggaactcatctggagcccggacattggggacacgcagctggacgtagagtttcttatggagctcttagatccagatgagctgcggggagaggctgggtactacctgaccacgtggtttggggcgctgcaccacattgcccactaccagcccgaaacagaccgcgctccccgggggctcagctccgaggcccgcgcctccctgcaccagtggcaccgcaggcggacgctgcacagaaaggatcatcccagagcccaacagctggactgaccctggctggtcgaagagccctggccagatgtcctgtggacagacccaatttctggcctcgtctgctgg

SEQ ID NO: 224 - DNA, 883 bp, Homo sapiens
agtgacctggaaacaagttctgatccagaaggtgaggattgggatgaggaagctgaggatgatggttttgatagtgatagctcactgtcagactcagaccttgaacaagaccctgaagggcttcacctttggaactctttctgcagtgtagatccttataatccccagaactttacagcaacaattcagactgctgccagaattgttcctgaagagccttctgattcagagaaggatttgtctggcaagtctgatctagagaattcctcccagtctggaagccttcctgagacccctgagcatagttctggggaggaagatgactgggaatctagtgcagatgaagcagagagtcttcaaactgtgggaacttcattctgttaattctggatggacccctacaaccctttaaattttaaggctccttttcaaacatcaggggaaaatgagaaaggctgtcgtgactcaaagaccccatctgagtccattgtggccatttctgagtgtcacaccttactttcttgtaaggtgcagctgttggggagccaagaaagtgaatgtccagactcggtacagcgtgacgttctttctggaggaagacacacacatgtcaaaagaaaaaaggtaaccttccttgaagaagttactgagtattatataagtggtgatgaggatcgcaaaggaccatgggaagaatttgcaagggatggatgcaggttccagaaacgaattcaagaaacagaagatgctattggatattgcttgacatttgaacacagagaaagaatgtttaatagactccagggaacatgcttcaaaggacttaatgttctcaagcaatgttgagttggcagcctgtagtcctagctagcatacactacct

SEQ ID NO: 225 - DNA, 389 bp, Homo sapiens
cggccgcgtctacggcatattctttttttggaactgtggagaatatggctccaaaagtggttaatcgtccaggtcatactcagagtgctgactgggggtcttttggggggttaatgggaaggtttgaatttgggatttttttaaaggggaaggagattgttaagtgaggatcaacagggaatggtaaagaaactgggggttttattttctttattttatgccctatgtaataaataaccaaaaaacattattgcgtgcagtataaaaggactatgaaatctgttagctgcgtctatctcatcctaatttgaaagggcaaaaaaaaatattaccatagatttcctgctaatagtaacaatctaaagcattaatggtgttgggtcttttgg

SEQ ID NO: 226 - DNA, 412 bp, Homo sapiens
gggtttgtttttcttccaggccccatgtctgtgggtttggacttctctctgccaggcatggagcatgtctatgggatccctgagcatgcagacaacctgaggctgaaggtcactgagtgagtcctatggtgacatcaggaagatggaggtgggcaggaaggagtcaggcctttagggagatgggtgtgcatattggatactctaggcaagcatgggtcatttcttgtgtccagaatcacctttggtgatagaaaattttttgagaaaggacaagaggagcctttgcttatctctcacctgtgtctgtggagtggtgttagcatataacgcagcctggggccagttagcagcccaagtctgtctgtttgcctgcaggggtggggagccatatcgcctctacaatttggatgtg

SEQ ID NO: 227 - DNA, 390 bp, Homo sapiens
gggagtgagtgccagggcactgacctggacacccgcaactgtaccagtgacctctgtgtacacactgcttctggccctgaggacgtggccctctatgtgggcctcatcgccgtggccgtctgcctggtcctgctgctgcttgtcctcatcctcgtttattgccggaagaaggaggggctggactcagatgtggctgactcgtccattctcacctcaggcttccagcccgtcagcatcaagcccagcaaagcagacaacccccatctgctcaccatccagccggacctcagcaccaccaccaccacctaccagggcagtctctgtccccggcaggatgggcccagccccaagttccagctcaccaatgggcacctgctcagccccctgggt

SEQ ID NO: 228 - DNA, 777 bp, Homo sapiens
cttatttataatgaagatatgatttgttggattgaatcaagagaatcttcaaatcaactcaaatgtatccagataacaaaagcaggaggattaacagatgaatggacaatcaatattcttcaatccttccacaatgtgcaacaaatggcgattgactggctcactcgaaatctctattttgtggaccatgtcggtgaccggatctttgtttgtaattccaacggttctgtatgtgtcaccctgattgatctggagcttcacaatcctaaagcaatagcagtagatccaatagcaggaaaacttttctttactgactacgggaatgtcgccaaagtggagagatgtgacatggatgggatgaaccgaacaaggataattgattcaaagacagagcagccagctgcactggcactagacctagtcaacaaattggtttactgggtagatctttacttggactatgtgggagtagtggactatcaaggaaaaaatagacacgctgtcattcaaggcagacaagtcagacatctttatggtataactgtgtttgaagattatttgtatgcaaccaattctgatagctacaatatcgtaaggataagccgatttaatgggactgatattcactcattaattaaaattgagaatgcttggggaatccgaatttatcaaaaaagaactcaaccaacagtcagaagccatgcatgtgaagtcgatccatatggaatgccagggggctgttcacacatctgtctactcagcagcagttacacgaaa

SEQ ID NO: 229 - DNA, 486 bp, Homo sapiens
tttcgtctgggaacccgcagcctggggactcctccggcgggggcgctgggggcgggctgccgtcccctggggagcaggagctgagccggcgcttgcagcgcctgtatcccgcggtcaaccagcaagagactccgctgccgcgctcctggagccccaaggacaaatacaactacattggtctctcccagggcaacctccgcgtccactacaaaggtcatggcaaaaatcacaaagatgcggcctcagtgcgtgccacccaccccatacctgctgcctgtggcatttattactttgaagtgaagattgtcagcaaaggaagagatggttacatgggaataggactctcggctcaaggcgtcaacatgaacagacttcctggttgggacaaacattcctatggttaccatggtgatgatgggcattcgttctgctcctcggggactggccagccctatggtcccacattcaccacaggagacgtgatcg

SEQ ID NO: 230 - DNA, 396 bp, Homo sapiens
ttttttttttttaagatggggtctcgctctgtcacccaggctggagtgcagtggtgtgatgtcagctcactgcaagctccgcctcccaggttcacactattctgcctcagcctcccaagtagctgggactacaggtgcgtgccaccatgcccggctaatttttttgtatttttagtagagacggggtttcaccgtgttagccagtatggtcttgatctcctgacctcgtgatccacctgcctcggcctcccaaaagtgctgggattacaggtgtgagctgctgcgcctggcttatgagtcgtatgttctgatcctccctcttgaagttgccttctgtggtctaaggagggcctgaaggttcaggtaaaaacttcagggtgaccttcactgggggtg

SEQ ID NO: 231 - DNA, 713 bp, Homo sapiens
tcagctcagcttggcacgaggaaaggtgttcttgtgtgccttgtcttttgtttactttgccaaagcattggcagaaggctatctgaagagcaccatcactcagatagagagaagggttgatatcccttcttcactggtgggagttattgatggtagttttgaaattgggaatctcttagttataacatttgttagctactttggagccaaacttcacaggccaaaaataattggagcagggtgtgtaatcatgggagttggaacactgctcattgcaatgcctcagttcttcatggagcagtacaaatatgagagatattctccttcctccaattccactctcagcatctctccgtgtctcctagagtcaagcagtcaattaccagtttcagttatggaaaaatcaaaatccaaaataagtaacgaatgtgaagtggacactagctcttccatgtggatttatgttttcctgggcaatcttcttcgtggaataggagaaactcccattcagcctttgggcattgcctacctggatgattttgccagtgaagacaatgcagctttctatattgggtgtgtgcagacggttgcaattataggaccaatctttggtttcctgttaggctcattatgtgccaaactatatgttgacattggctttgtaaacctagtcatttttaggtggaagcatgttacagcacattatcgaggaa

SEQ ID NO: 232 - DNA, 1067 bp, Homo sapiens
cagccttccaaggtagggcacaccaaggcctaaggaatcagaaagggcccgagggtgggctgtgtcctggctttcaggccctggggcgaccaccagcctctgctcactctgaggctccagccagggcgccaagcctcaggaccgtgggtggggcccaaggacactctggacccccgttccattcatgagaggccctcagcacgccacgtgtctgctgtgacagcccgcagggagggtggaagccttctgtaaattccacatgtgggccgagggcatgacgtccttgatgaaggccgcgctggacctcacctaccccatcacgtccatgttctccggagccggcttcaacagcagcatcttcagcgtcttcaaggaccagcagatcgaggacctgtggattccttatttcgccatcaccaccgacatcacagcctcggccatgcgggtccacaccgacggctccctgtggcggtacgtgcgtgccagcatgtccctgtccggttacatgccccctctctgtgacccgaaggacggacacctgctgatggacgggggctacatcaacaacctcccagcggatgtggcccggtccatgggggcaaaagtggtgatcgccattgacgtgggcagccgagatgagacggacctcaccaactatggggatgcgctgtctgggtggtggctgctgtggaaacgctggaaccccttggccacgaaagtcaaggtgttgaacatggcagagattcagacgcgcctggcctacgtgtgttgcgtgcggcagctggaggtggtgaagagcagtgactactgcgagtacctgcgcccccccatcgacagctacagcaccctggacttcggcaagttcaacgagatctgcgaagtgggctaccagcacgggcgcacggtgtttgacatctggggccgcagcggcgtgctggagaagatgctccgcgaccagcaggggccgagcaagaagcccgcgagtgcggtcctcacctgtcccaacgcctccttcacggaccttgccgaaattgtgtctcgcattgagcccgccaagcccgccatgg

SEQ ID NO: 233 - DNA, 704 bp, Homo sapiens
tttcgtgtgagggagagccgagggaaccagcgcggtgcctagcggaactccagggctggaatcccgagacacaagtgcatctgctagctgttagcacttggcagacggagttctcctctagggtagttctaactttgggtaataatgtttgtcagctacctgatattaacattgctccacgttcaaacagcagtgttagcaagacctgggggagagagcattggctgtgatgactacttaggctccgacaaagtcgtggacaaatgtggggtgtgtggaggagacaacacgggctgtcaggttgtgtcgggcgtgtttaagcatgccctcaccagcctgggctaccaccgcgtcgtggagattcccgagggagccacgaaaatcaacatcacggagatgtacaagagcaacaactatttggccctgagaagtcgttctggacgctccatcatcaatgggaactgggcaattgatcgaccaggaaaatacgagggcggagggaccatgttcacctacaagcgtccaaatgagatttcgagcactgccggagagtcctttttggcggaaggtcccaccaacgagatcttggatgtctacgtgagtttggatgtttctggactgttctttggattttgaatcttgtcacttctaaggaacatactctgaacaaataagcaacaaatcattgcccatactcaataaaa

SEQ ID NO: 234 - DNA, 420 bp, Homo sapiens
atttcaggagggaccagaagcgcaggcccgctcaggaggaattacaacttcatcgccgcggtggtggagaaggtggcgccatcggtggttcacgtgcagctgtggggcaggaaccagcagtggattgaggtggtgctccagaatggggcccgttatgaagctgttgtcaaggatattgaccttaaattggatcttgcggtgattaagattgaatcaaatgctgaacttcctgtactgatgctgggaagatcatctgaccttcgggctggagagtttgtggtggctttgggcagcccattttctctgcagaacacagctactgcaggaattgtcagcaccaaacagcgagggggcaaagaactggggatgaaggattcagatatggactacgtccagattgatgccacaattaactatggg

SEQ ID NO: 235 - DNA, 1057 bp, Homo sapiens
cccacgcgtccgagaactcaaagaaattctggataggaaagggcatttctcagagaatgagacaaggtggatcattcaaagtctcgcatcagctatagcatatcttcacaataatgatattgtacatagagatctgaaactggaaaatataatggttaaaagcagtcttattgatgataacaatgaaataaacttaaacataaaggtgactgattttggcttagcggtgaagaagcaaagtaggagtgaagccatgctgcaggccacatgtgggactcctatctatatggcccctgaagttatcagtgcccacgactatagccagcagtgtgacatttggagcataggcgtcgtaatgtacatgttattacgtggagaaccaccctttttggcaagctcagaagagaagctttttgagttaataagaaaaggagaactacattttgaaaatgcagtctggaattccataagtgactgtgctaaaagtgttttgaaacaacttatgaaagtagatcctgctcacagaatcacagctaaggaactactagataaccagtggttaacaggcaataaactttcttcggtgagaccaaccaatgtattagagatgatgaaggaatggaaaaataacccagaaagtgttgaggaaaacacaacagaagagaagaataagccgtccactgaagaaaagttgaaaagttaccaaccctggggaaatgtccctgagaccaattacacttcagatgaagaggaggaaaaacaggtaggaagaatcattgctgcatttctcccaagtgtaaaataccctcaccacacctggaacatttttttgcaaatctgtctttttgttgttagtttgtaacaaaggccgagcgttatatagcaagtaaagttctttctgccttataaggctagcatgatttagcgaggtggcctacatgtttattttaaggttggtgattatgtagggcaggtgtctgcaaactttttctgtaagggaacaaacagtaaatattttaggctttgtgggccctagtagtctttgtcacaactactc

SEQ ID NO: 236 - DNA, 467 bp, Homo sapiens
ttgagtattagtgtcagtgatgtgtctctctctgatgaaggacagtacacctgttctttatttacaatgcctgtcaaaacttccaaggcatatctcaccgttctgggtgttcctgaaaagcctcagattagtggattctcatcaccagttatggagggtgacttgatgcagctgacttgcaaaacatctggtagtaaacctgcagctgatataagatggttcaaaaatgacaaagagattaaagatgtaaaatatttaaaagaagaggatgcaaatcgcaagacattcactgtcagcagcacactggacttccgagtggaccggagtgatgatggagtggcggtcatctgcagagtagatcacgaatccctcaatgccacccctcaggtagccatgcaggtgctagaaatgcactatacaccatcagttaagattataccatcgactccttttccacaagaaggacg

SEQ ID NO: 237 - DNA, 416 bp, Homo sapiens
  misc_feature (1)...(416): n = a,t,c or g
ggtacaaccagaaagtggatctcttcagcctgggaattatcttctttgagatgtcctatcaccccatggtcacggcttcagaaaggatctttgttctcaaccaactcagagatcccacttcgcctaagtttccagaagactttgacgatggagagcatgcaaagcagaaatcagtcatctcctggctgttgaaccacgatccagcaaaacggcccacagccacagaactgctcaagagtgagctgctgcccccaccccagatggaggagtcagagctgcatgaagtgctgcaccacacgctgaccaacgtggatggaaaggcctaccgcaccattgatgggcccagatcttttcggcagcgcatctcccctgccatcgntttacacctatgaccagcgacatattgaagggcaact

SEQ ID NO: 238 - DNA, 739 bp, Homo sapiens
ggaccaggactacaagtacgacagtacctcagacgacagcaacttcctcaacccccccagggggtgggaccatacagccccaggccaccggacttttgaaaccaaagatcagccagaatatgattccacagatggcgagggtgactggagtctctggtctgtctgcagcgtcacctgcgggaacggcaaccagaaacggacccggtcttgtggctacgcgtgcactgcaacagaatcgaggacctgtgaccgtccaaactgcccaggaattgaagacacttttaggacagctgccaccgaagtgagtctgcttgcgggaagcgaggagtttaatgccaccaaactgtttgaagttgacacagacagctgtgagcgctggatgagctgcaaaagcgagttcttaaagaagtacatgcacaaggtgatgaatgacctgcccagctgcccctgctcctaccccactgaggtggcctacagcacggccgacatcttcgaccgcatcaagcgcaaggacttccgctggaaggacgccagcgggcccaaggagaagctggagatctacaagcccactgcccggtactgcatccgctccatgctgtccctggagagcaccacgctggcggcacagcactgctgctacggcgacaacatgcagctcatcaccaggggcaagggggcgggcacgcccaacctcatcagcaccgagttctccgcggagctccactacaaggtggacgtc

SEQ ID NO: 239 - DNA, 611 bp, Homo sapiens
ggaatcggaagaaaatggagagagtgcaatggacagcacagtggccaaagaaggcactaatgtaccattagttgctgctggtccttgtgatgatgaaggcattgtgactagcacaggcgcaaaagaggaagacgaggaaggggaggatgttgtgactagtactggaagaggaaatgaaattgggcatgcttcaacttgtacagggttaggagaagaaagtgaaggggtcttgatttgtgaaagtgcagaaggggacagtcagattggtactgtggtagagcatgtggaagctgaggctggagctgccatcatgaatgcaaatgaaaataatgttgacagcatgagtggcacagagaaaggaagtaaagacacagatatctgctccagtgcaaaagggattgtagaaagcagtgtgaccagtgcagtctcaggaaaggatgaagtgacaccagttccaggaggttgtgagggtcctatgactagtgctgcatctgatcaaagtgacagtcagctcgaaaaagttgaagataccactatttccactggcctggtcgggggtagttacgatgttcttgtatctggtgaagtcccagaatgtgaagttgctcaca

SEQ ID NO: 240 - DNA, 1090 bp, Homo sapiens
ttttttttttttaagcttgaaataaaatttttattttgttttgaattaaatcaaccatgattattcacagtgcagtaagtgtgtatcatctgtttgatattttcatattacagttttgatagtgctcttcagtctgcgaaatcttctttgggtggaaatgatgaactgtcagctactttcttagaaatgaaaggacatttctatatgtatgctggttctctgctcttgaagatgggtcagcatggtaataatgttcaatggcgagctctttctgagctggctgcgttgtgctatctcatagcatttcaggtaagtcttccacttggagcaattgacatttcacggagtcttgatgtgttttaaatgaaggtgtgctctggtatgtaatgacaatatgtgaacaaacctgtggaattaaagttaaaatgaaatagtcaatttgatacagtggaaaataactaagcatacacaatactggtgaggctggtgaaacagggatgttgaatgcactcttgtcgaaagcctgcattgccatgatttgtttgtagacaaatttgaagagtttgatctttttactctgccatttttgggaacatgataaagatgtaatctcgtattatgggtaaagcttgattcaaaaagatgtgttacttggacaaaatcctaataagtagacgtagggcaatggctttatagcctatgatagaagaatatgattgcaatttaacatgttaattgaaacacatgtatataacatttatgactgtattgtgtatatgtaacagtatatctattaatctttgaaaacataaaaccttttcttattttttatttttttatttttttttgagaccaagtctctctctgtcgccaggctggagtgcagtggtgtgatctcggctcactgcagcctccacctcctgggttcgagtgattctcctgcctcagcctcccgagtagctgggactacaggcccatgctaccaagcccagctaattttttgtatttttaatagagatggggtttcaccatgttggccaggatggtcgcaatctcttgacctcttgatctacctgccttggtctcccaa

SEQ ID NO: 241 - DNA, 680 bp, Homo sapiens
gcaacacccatcccaggaaaagccacaagtcctgacccccagccccaggaagcagaagctgaacagaaagtacaggtcccaccatgaccagatgatctgcaagtgcctctccctgagcatatcctactccgctaccattggcggcctgaccaccatcatcggcacctccaccagcctcatcttcctggaacacttcaacaaccagtatccagcctcagaggtggtgaactttggcacctggttcctcttcagcttccccatatccctcatcatgctggtggtcagctggttctggatgcactggctgttcctgggctgcaattttaaagagacctgctctctgagcaagaagaagaagaccaaaagggaacagttgtcagagaagaggatccaagaagaatatgaaaaactgggagacattagctacccagaaatggtgactggatttttcttcatcctgatgaccgtactgtggtttacccgggagcctggctttgtccctggctgggattctttctttgaaaagaaaggctaccgtactgatgccacagtctctgtcttccttggcttcctcctcttcctcattccagcgaagaagccctgctttgggaaaaagaatgatggagagaaccaggagcactcactggggaccgagcccatcatcacgtggaaggacttcc

SEQ ID NO: 242 - DNA, 491 bp, Homo sapiens
cttgaaagagaaggggacaaaggaacaccagtattaagaggattttccagtgtttctggcagttggtccagaaggatgcctccattcctgcttctcacctgcctcttcatcacaggcacctccgtgtcacccgtggccctagatccttgttctgcttacatcagcctgaatgagccctggaggaacactgaccaccagttggatgagtctcaaggtcctcctctatgtgacaaccatgtgaatggggagtggtaccacttcacgggcatggcgggagatgccatgcctaccttctgcataccagaaaaccactgtggaacccacgcacctgtctggctcaatggcagccaccccctagaaggcgacggcattgtgcaacgccaggcttgtgccagcttcaatgggaactgctgtctctggaacaccacggtggaagtcaaggcttgccctggaggctactatgtgtatcgtctgaccaagcccagcgtttg

SEQ ID NO: 243 - DNA, 983 bp, Homo sapiens
tgcggccgcaccatgagcgacatccgccactcgctgctgcgccgcgatgcgctgagcgccgccaaggaggtgttgtaccacctggacatctacttcagcagccagctgcagagcgcgccgctgcccatcgtggacaagggccccgtggagctgctggaggagttcgtgttccaggtgcccaaggagcgcagcgcgcagcccaagagactgaattcccttcaggagcttcaacttcttgaaatcatgtgcaattatttccaggagcaaaccaaggactctgttcggcagattattttttcatcccttttcagccctcaagggaacaaagccgatgacagccggatgagcttgttgggaaaactggtctccatggcggtggctgtgtgtcgaatcccggtgttggagtgtgctgcctcctggcttcagcggacgcccgtggtttactgtgtgaggttagccaaggcccttgtagatgactactgctgtttggtgccgggatccattcagacgctgaagcagatattcagtgccagcccgagattctgctgccagttcatcacctccgttaccgcgctctatgacctgtcatcagatgacctcattccacctatggacttgcttgaaatgattgtcacctggatttttgaggacccaaggttgattctcatcacttttttaaatactccgattgcggccaatctgccaataggattcttagagctcaccccgctcgttggattgatccgctggtgcgtgaaggcacccctggcttataaaaggaaaaagaagccccccttatccaatggccatgtcagcaacaaggtcacaaaggacccgggcgtggggatggacagagactcccacctcttgtactcaaaactccacctcagcgtcctgcaagtgctcatgacgctgcagctgcacctgaccgagaagaatctgtatgggccgcctggggctgatcctcttcgaccacatggtcc

SEQ ID NO: 244 - DNA, 526 bp, Homo sapiens
  misc_feature (1)...(526): n = a,t,c or g
cggctcgtccnnatttgaaccccttctttgatcggcctgcagtaccgggccggaattacccggtcgagccacgcgttcgctcacgcgtccggccaaccagaagggttgcgacggggaccgcctgtactacgacggctgtgccatgatcgccatgaacggaagcgtctttgctcaaggatcccagttttctctggatgacgtggaagtcctgacggccacgctggatctggaggacgtccggagctacagggcggagatttcatctcgaaacctggcggtgagtgctccagtagacacctgtgtgggatgctcatcaaagacgtggaaagtggccccattcgtgcgggcctggtggaggccgtgagggtgcagtgcctgaaaagtctgacagggaagttccggacttcccgagcgtggaaaggggctggtgccgcagacagaacctgcttccatctgttccccgtcatcctctgcttgggccaggccctgagctggggtgagctggggacaggcaggcaggtgtatt

SEQ ID NO: 245 - DNA, 418 bp, Homo sapiens
ggggcgggccccccaggtaggcatggctgctgcccccagcccatttcttttgaatctgttcactcctattcactcctacttgccactccttctattcattactcactgcccctgcccctagtccccatggtacccctgagccatgggcatttcctgagccccactcagcaggctctgcttcccccaggtcctggtgaacgagggcggtggctttgaccgggcctctggctccttcgtagcccctgtccggggtgtctacagcttccggttccatgtggtgaaggtgtacaaccgccaaactgtccaggtgacctcagcactggcccccatccccggctcaggagggtggggagggggaagaaggggagcccagctgacctccgggtggactctccattgacctgtgtcctggacgaaa

SEQ ID NO: 246 - DNA, 706 bp, Homo sapiens
acctcatattattggagcagaagatgatgattttggtactgaacatgaacagatcaatggacagtgcagctgtttccagagcattgaattgctaaaatctcgcccggctcatttggctgttttcttacgccatgtagtttcacaatttgaccctgcgactttgctttgttatctctattcagacctgtataaacataccaattccaaagaaactcgtcgcatcttccttgagtttcatcagttctttctagatcgatcagcacacctgaaagtttctgttcctgatgaaatgtctgcagatctagaaaagagaagacctgagctcattcctgaggatctgcatcgccactatatccaaactatgcaagaaagagtccatccagaagttcaaaggcacttagaagattttcggcagaaacgtagtatgggactgaccttggctgaaagcgagctgactaaacttgatgcagagcgagacaaggaccgattgactttggagaaggagcggacatgtgcagaacagattgttgccaaaattgaagaagtattgatgactgctcaggctgtagaggaagataagagctccaccatgcagtatgttattctcatgtatatgaagcatttgggagtaaaagtgaaagagcctcgaaatttggagcacaaacggggtcggattggatttcttcccaaaatcaagcaaagtatg

SEQ ID NO: 247 - DNA, 439 bp, Homo sapiens
caagggaggggggttgatcccctggcacaggtcgaggccctggacccacatcctttgtctgcctccccaccccacagtgcccgttcatcgacgatttcatcctggccctccataggaagatcaagaatgagcccgtggtgtttcctgaggggccagaaatcagcgaggagctcaaggacctgatcctgaagatgttagacaagaatcccgagacgagaattggggtgccagacatcaagttgcacccttgggtgaccaagaacggggaggagccccttccttcggaggaggagcactgcagcgtggtggaggtgacagaggaggaggttaagaactcagtcaggctcatccccagctggaccacggtgatcctggtgaagtccatgctgaggaagcgttcctttgggaacccgtttgagccccaagcacgaatggcgaa

SEQ ID NO: 248 - DNA, 730 bp, Homo sapiens
cccacgcgtccggaataaagatagataagacttccgatggaccaaaacttttcttaacagaagaagatcaaaagaaacttcatgattttgaagagcagtgtgttgaaatgtatttcaatgaaaaagatgacaaatttcattctgggagtgaagagagaattcgtgtcacttttgaaagagtggaacagatgtgcattcagattaaagaagttggagatcgtgtcaactacataaaaagatcattacaatcattagattctcaaattggccatttgcaagatctttcagccctgacggtagatacattaaaaacactcactgcccagaaagcgtcggaagctagcaaagttcataatgaaatcacacgagaactgagcatttccaaacacttggctcaaaaccttattgatgatggtcctgtaagaccttctgtatggaaaaagcatggtgttgtaaatacacttagctcctctcttcctcaaggggatcttgaaagtaataatccttttcattgtaatattttaatgaaagatgacaaagatccccagtgtaatatatttggtcaagacttacctgcagtaccccagagaaaagaatttaattttccagaggctggttcctcttctggtgccttattcccaagtgctgtttcccctccagaactgcgacagagactacatggggtagaactcttaaaaatatttaataaaaaacaaaaaaaaagggcggc

SEQ ID NO: 249 - DNA, 466 bp, Homo sapiens
attgctgccgctggatcgactgctttgccttgtacgaccagcaggaggagctcgtgcggcacatcgagaaggtccacatcgaccagcgcaaaggggaggacttcacttgcttctgggccggttgccctcgaagatacaagcccttcaacgcccgctataaactgctgatccacatgagagtccactctggggagaagcccaacaagtgtacgtttgaaggttgcgagaaggccttttcaaggcttgaaaatctcaagatccacttgcggagccacacaggcgagaagccgtatttgtgccagcatccgggttgtcagaaggccttcagtaactccagtgaccgcgccaaacaccagcggacgcatctggacactaaaccttatgcttgtcaaattccaggatgtaccaaacgctacacagacccaagttccctaagaaagcatgtgaaggcacattcttccaaaga

SEQ ID NO: 250 - DNA, 963 bp, Homo sapiens
ggagcggctgccacggaaaacgcctggccggacggtggctggcggccctgcctgggcgcggagggcggcggtggcgggccccgcggccttctctcagcttcctttctcctcacgacggcctccacagtccggagcccggcggagcccggacctggcggggagagctgcctccacggccgggcacccagaccccaccgtcgcagtcgccaccacctcagtccatccttggtaccggcaatgggcttcgtatcctccagtgcacttgtaactgacttggacacggaatactaagaactcacttctgtcctcatcccagtcgcgccggcggtgaccatctcggctcttttgggcttaactgccgctcctctggactctgtctgactttgggggcaccatggaccaaagtgggatggagattcctgtgaccctcatcattaaagcaccgaatcagaaatacagtgaccagactattagctgcttcttgaactggaccgtggggaaactaaaaacgcatctatctaacgtttaccctagcaaaccagtaagtgtgtaaaagctgggggcagctgctctgaccagcagcttttcgtgccgtgtaccctcctttttcctgcttctcccctccagtcttgaatcaaataggtctcttttggtagaccgcgaggtattttgagttctgaggttgtgtctcctgagtgttcgaaccatcattaatattttcctgatgaggttcagttaattagtaagaggaagcagaaatatcaagggacttaagaattggcaggcaaagaccgggcgcggtggctcacgcctgtaatcccagcactttgggaggccaaggcgggcggatcacgaggtcaggagttcgagaccagccttaccggcatggtgaaaccctgtgtctactgaaaatacaaaaattaactgggcgtggtggcgcatgcttgtaatcccagctactcg

SEQ ID NO: 251 - DNA, 894 bp, Homo sapiens
gcggggacccggatgtgtgtggtggcggcggccgaagagcttgtgtgcggagctgagaggcctatggatgaggaggacgcggcggccccggtttgttctcatgaacaagatggatgacctcaacctgcactaccggtttctgaattggcgccggcggatccgggagattcgagaggtccgagctttccgatatcaggagaggttcaaacatatccttgtagatggagatactttaagttatcatggaaactctggtgaagttggctgctacgtggcttctcgacccctgaccaaggacagcaattattttgaggtgtctattgtggacagtggagtccggggcaccattgctgtggggctggtccctcagtactacagcttggatcaccagcctggctggttgcctgactctgtagcctaccatgctgatgatggcaagctgtacaatggccgagccaagggccgccagtttgggtcaaagtgcaactccggggaccggattggctgtggcattgagcctgtgtcctttgatgtgcagaccgcccagatcttcttcaccaaaaatgggaagcgggtgggctctaccatcatgcccatgtccccagatggactgttcccagcagtgggcatgcactccctgggtgaggaggtgcggctgcacctcaacgctgagctgggccgtgaggacgacagcgtcatgatggtggacagttacgaggatgaatggggccggctacatgatgtcagagtctgtgggactctgctggagtacttagggaagggcaaaagcatcgtggatgtggggctggcccaggcccggcacccactcagcacccgcagccactacttcgaggtggagatcgtggaccctggagagaaatgctacatcgccct

SEQ ID NO: 252 - DNA, 861 bp, Homo sapiens
tcccgggtcgacgatttcgtctggagtgttagcaccagtactggatgtgacagcaggcagaggagcacttagcagcttattcagtgtccgattctgattccggcaaggatccaagcatggaatgctgccgtcgggcaactcctggcacactgctcctctttctggctttcctgctcctgagttccaggaccgcacgctccgaggaggaccgggacggcctatgggatgcctggggcccatggagtgaatgctcacgcacctgcgggggaggggcctcctactctctgaggcgctgcctgagcagcaagagctgtgaaggaagaaatatccgatacagaacatgcagtaatgtggactgcccaccagaagcaggtgatttccgagctcagcaatgctcagctcataatgatgtcaagcaccatggccagttttatgaatggcttcctgtgtctaatgaccctgacaacccatgttcactcaagtgccaagccaaaggaacaaccctggttgttgaactagcacctaaggtcttagatggtacgcgttgctatacagaatctttggatatgtgcatcagtggtttatgccaagtaagtgctgatttgttctcattcaacttgtccagagggtttcaatgtctttgtgtaaatggtttacatagtctcactctctgaatcactcatctttacactttttagagtttgtaaatggtgaaagatttgaaaattaaggtatgatttcagtgaaaagtaccaagtgttgtattgtgcgaaggaaaagtagactagagttatttttctttccttgagtgtcacttgaatataaaagaataaaaatttttgaatagtgttaaaaaaaaaa

SEQ ID NO: 253 - DNA, 556 bp, Homo sapiens
caggctgttaagacaagagcttgtggtgctttgccaccttcaccaccccagtttgatatctttgctggcagctgggattcgtccccggatgttggtgatggagttagcctccaagggttccttggatcgcctgcttcagcaggacaaagccagcctcactagaaccctacagcacaggattgcactccacgtagctgatggtttgagatacctccactcagccatgattatataccgagacctgaaaccccacaatgtgctgcttttcacactgtatcccaatgctgccatcattgcaaagattgctgactacggcattgctcagtactgctgtagaatggggataaaaacatcagagggcacaccagggtttcgtgcacctgaagttgccagaggaaatgtcatttataaccaacaggctgatgtttattcatttggtttactactctatgacattttgacaactggaggtagaatagtagagggtttgaagtttccaaatgagtttgatgaattagaaatacaaggaaaattacctgatccagttaaagaatag

SEQ ID NO: 254 - DNA, 435 bp, Homo sapiens
caaaggccagtaatagtacccatgagtttcgtattggcctacctgaggggtgggaatccgaaaaaaaggcagttatccccctggggatcgggccacccctgactttaatctgcctaggggttctggggggtattctcatctacgggaggaaaggcttccaaactgcccacttttacttaaaggacagtccatcccctaaagtaatatccacccctccaccacctatctttccaatttcaaaggaggtcggaccaattccaataaagcactttccaaagcatgtggcaaatttacatgcaagtagggggtttactgaaaaatttgaaacactgaaaaagttttaccaggaagggcaaagctgtactgttgacttaggtattacagcaaacagctccaaccacccagacaacaggcacaggaatcgatccttaattg

SEQ ID NO: 255 - DNA, 698 bp, Homo sapiens
cctcatttcctgatcgaacagcctcacttgtgttgctgtcagtgccagtagggcaggcaggaatgcagcagagaggactcgccatcgtggccttggctgtctgtgcggccctacatgcctcaccagccatacttcccattgcctccagctgttgcacggaggtttcacatcatatttccagaaggctcctggaaagagtgaatatgtgtcgcatccagagagctgatggggattgtgacttggctgctgtcatccttcatgtcaagcgcagaagaatctgtgtcagcccgcacaaccatactgttaagcagtggatgaaagtgcaagctgccaagaaaaatggtaaaggaaatgtttgccacaggaagaaacaccatggcaagaggaacagtaacagggcacatcaggggaaacacgaaacatacggccataaaactccttattagagagtctacagataaatctacagagacaattcctcaagtggacttggccatgattggttagtctcgctctgtcacacaggctggagggcagtggcgggatctcggttcaccccaacctttgcctcacgggttcaagggattctcgtgcctcagccttccaagtggctgggattgcaggtgtgcgccagtacgcctggctagttttagtattttttgttacagacggggtttcaccatgttggctgggctggt

SEQ ID NO: 256 - DNA, 736 bp, Homo sapiens
gtttgaacagcccggaaacccgggcgacccacgcgtacgaactccgcccccatgggggccccactttttcgctttgattccttcttcccccaaagaggtcccagctaccccatcctccagaagggaccccattgccccaacagcgactcttctctctaaaaagaccccagcaactctagcccccaaagaggccctcattcccccagctatgactgttccctcccctaaaaagaccccagcaattccaacccccaaagaagccccagctaccccatcctccaaagaggcctccagtcccccagcagtgactccttccacttacaaaggggccccatcccccaaagagctcctcattccaccagctgtgacttctccttcccccaaagaggcacctactcctccagctgtgactcctccatcccccgaaaagggcccagcaactccagcccccaaagggactcccacttccccacctgtgactccttcctccctcaaagactcccctacttccccagcttctgtcacatgtaaaatgggggccactgttcctcaagcatctaaagggcttccagcaaagaaaggccccacagctctgaaagaagtacttgttgccccagctccagaaagcacgccaatcatcacagctcccactcggaaaggtccacagaccaaaaagagttctgctacttcacctcctatatgcccagatccctcagctaagaatggttctaaagga

SEQ ID NO: 257 - DNA, 77 bp, Homo sapiens
ctccgcctcccaaagtactgggattacaggtgtgagccaccgtgcccagccaagaccttgtatctttaaaaaaaaaa

SEQ ID NO: 258 - DNA, 499 bp, Homo sapiens
aatgctcctttggtaagaacaattatatggctaaattaatctcagccacctagttctaaatgtagagcaaggattgcaagggattatttagacaagttcatcaattaagtaaaattagacatgaaggatataagaatgaatgataaagcaagctaaaaatggtgaaacaagggatgtctgattggaagtagaagatatttatttaggttctaggacattagtatcagtgaggacagtaatttcctgcttgtttgtatttcagtgatcacatacacttctttacctgataacgtctctcttctctaggctggttttggttacggcttgccaatttctcgtctgtatgccaagtactttcaaggagatctgaatctctactctttatcaggatatggaacagatgctatcatctacttaaaggtatcccttgaattcaatagcaaaatcctgtttctaaaaccattgctccttttatagccctgagtgctatggtccggag

SEQ ID NO: 259 - DNA, 621 bp, Homo sapiens
tttcgtgactgtagtcagcccttagtggatgagagcgcctatgcttcagaaacagcaggctcccaggatggacaccccgccccctgaagaacgcttagagaagcaaaatgaaaaactgaacaaccaggaagaggagacggagtttaaggaactggacggtctgagggaagccttggcaaacctccggggactgtcagaggaggagaggagcgagaaggctatgcttcgctcccgcattgaagagcagtcccagctcatctgcatcctgaagcggaggtcagatgaggccctggagcgctgccagatcctagagctgctcaatgcagagctggaggagaagatgatgcaggaggctgagaagctcaaggcccagggtgagtacagtcggaaactagaggaacgctttatgaccctagcagccaaccacgagttgatgctccgcttcaaggatgaatacaagagtgagaacatcaagctgagggaggagaatgagaagctgaggctggagaataacagcctcttcagccaggctctgaaggatgaggaggcgaaagtattacagctcacagtccggtgtgaggccctcactggggagctagaaacgctgaaggagaggtgtgc

SEQ ID NO: 260 - DNA, 414 bp, Homo sapiens
agatccgggtgcgagccacgcgtccgtgcaggtgcaggtactgaaagagcaactttttgctgggcgtatgccttcacccttccgctcctgcgcactcatgggaatgtgtggcagtagaagcgctgataacttgtcatgcccttctccattgaatgtaatggaaccagtaagcttctttcctcttaaatcactggggaagggaatgatacaacatttcagacacatagtttccctagtttagatgaaatatatgtttattttaaatacataatttgataaattattgttgattggaagtgactttcacctttgaaagtccattgctgtctgaagccactagaaagccacctgaattgcaatagtgatttatctttctgactaaaggaggtaatgcaccataaaaacatgtacagt

SEQ ID NO: 261 - DNA, 620 bp, Homo sapiens
gtaaccaccactactcatagcgttggacgagggcatgagctacagttgcttaatgaagaactgagaaacattgagcttgagtgtcagaatatcatgcaggctcacaggctccagaaagtgacagaccagtatggagacatctggacattgcatgatggaggattccggaattataacaccagcatagatatgcaaaggggaaagctagatgacatcatggagcatccagaaaagtctgacaaggacagttctagtgcttacaacacagctgagagctgcagaagtactccgctcactgtagaccgttcccctgacagttcccttccaagggtgatcaacctcaccaataagaaaaacctgagaagcacaatggcagccacccagtcctcttccggacagagcagtaaagagtcgacctccaccaaagccaaaaccactgagcaaggttgtagcgctgaaagcaaggagaaggttttagaaggcagcaagcttcctgatcaagagaaggcagtcagcgaacacatcccttacctctctccttaccacagctcctcatatagatatgcaaacatcccagcacacgcccggcattatcaaagctacatgcagttaattcaacg

SEQ ID NO: 262 - DNA, 418 bp, Homo sapiens
gggtctggggctgcctggccaccgtgtccacccacaagaagatccaaggactgccatttgggaactgcctgcccgtcagtgatggccccttcaacaatagcactgggattcctttcttctacatgacagccaaggaccccgtggtggctgatctgatgaagaaccccatggcctcgctgatgctgccagaatcagaaggggagttctgcagaaaaaacatcgttgatccggaagatccccgatgtgtccagttaacgctcactggccagatgatcgcagtgtctccagaagaagtagaatttgccaagcaagccatgttttcaaggcacccagggatgaggaagtggcctcgtcaatatgaatggttctttatgaagatgaggatagaacatatctggcttcagaaatggtatggagg

SEQ ID NO: 263 - DNA, 441 bp, Homo sapiens
tttcgtcagagccgcgggaggacggttgcctggtattattagcaagcagcaaatatggcggtggcgcgcgtggacgcggctttgcctcccggagaaggatcagtggtcaattggtcaggacagggactacagaaattaggtccaaatttaccctgtgaagctgatattcacactttgattctggataaaaatcagattattaaattggaaaatctggagaaatgcaaacgattaatacagttatcagtagctaataatcggctggttcggatgatgggtgtggccaagctgacgttgcttcgtgtattaaatttgcctcataatagcattggctgtgtggaagggctaaaggaactagtacatctggaatggctgaatttggcaggaaataatcttatagccatggaacagatcaatagctgcacagctctacagcatctc

SEQ ID NO: 264 - DNA, 832 bp, Homo sapiens
tatttcgagcggcagttggggcggtaccagagggtgcctggaaggatacggcccagctccacaagagcgaggaggcgaagcgggtgctgcggtattacctcttccagggccagcgctatatctggatcgagacccagcaagccttctaccaggtcagcctcctggaccatggccgctcttgtgacgacgtccaccgctcccgccatggcctcagcctccaggaccaaatggagaggaaggccatttacggccccaacgtgatcagcataccggtcaagtcctacccccagctgctggtggacgaggccttcagcatcgcgctgtggctggctgaccactactactggtacgccctgtgcatcttcctcatttcctccatctccatctgcctgtcgctgtacaagaccagaaagcaaagccagactctaagggacatggtcaagttgtccatgcgggtgtgcgtgtgccggccagggggagaggaagagtgggtggactccagtgagctagtgcccggagactgcctggtgctgtcccaggagggtgggctgatgccctgtgatgccgccctggtggccggcgagtgcatggtgaatgatagctctctgacaggagagagcattccagtgctgaagacggcactgccggaggggctggggccctactgtgcagagacacaccggcggcacacactcttctgcggaaccctcatcttgcatgcccgggcctatgtgggaccgcacgtcctggcagtggtgacccgcacaggtatgagccgggaggctgggcttgagagagatccgggctcagcacccttgaagaggtggagtgg

SEQ ID NO: 265 - DNA, 714 bp, Homo sapiens
tttcgtcgggggcgggctccaccttcacctctgccttctgctctgcttcatgctgcccgaggacgctgccatggctgtgctgacggcctccaaccacgtgagcaacgtcaccgtgaactacaacatcaccgtggagcggatgaacaggatgcagggcctgcgggtctctacagtgccagccgtgctgtcccccaatgccacgctggcactgacggcgggcgtgctggtggactcggccgtggaggtggccttcctgtggacctttggggatggggagcaggccctccaccagttccagcctccatacaacgagtccttcccggttccagacccctcggtggcccaggtgctggtggagcacaatgtcacccacacctacgctgccccaggtgagtacgtcctgaccgtgctggcatctaatgccttcgagaaccggacgcagcaggtgctgatccgcagtggccgggtgcccattgtgtccttggagtgtgtgtcctgcaaggcacaggccgtgtacgaagtgagccgcagctcctacgtgtacctggagggccgctgcctcaattgcagcagcggctccaagcgagggcggtgggctgcacgtacgttcagcaacaagacgctggtgctggatgagaccaccacatccacgggcagcgcaagcatgtgactggtgctgcggcggggcgtgctgcgggacggcgagggatacac

SEQ ID NO: 266 - DNA, 1872 bp, Homo sapiens
cccggaattcctgggtcgactatttcgtggaaaggctgccactctgcatgtgcacagtgaccagaagccccttcacgatggggccctcgggtcgcagcagaacttggttcgcatgaaggaggcgctgagggccagcaccatggacgtcaccgtggtcctgcctagtgggctggagaagaggagcgtgctcaatgggagccatgcgatgatggacctactggttgaactttgccttcagaaccacctgaatccatcccaccatgcccttgaaattcggtcttcagaaacccaacaacctttgagttttaagccaaatactttgattgggaccctgaatgtgcatactgtgtttctgaaagaaaaagttcctgaagagaaggttaagcctggtccccctaaggtgcctgagaaatctgtgcgtttggtcgtgaattacctgcggacacaaaaagctgttgtgcgtgtgagccctgaggttcctctccagaatattctcccagtcatttgtgcaaagtgtgaggtcagcccagagcacgtggttctcctcagggacaacattgccggagaggagctggagctgtccaagtccctgaacgagctcgggataaaggagctctacgcgtgggacaacagaagagaaacctttaggaaatcatcacttggcaatgatgagacagataaagagaagaaaaaatttctgggatttttcaaagttaataaaagaagcaatagtaagggctgtttaacgacccccaactccccatccatgcactcacgttctcttacgctgggtccatccctctcgctgggcagcatctcaggggtgtccgtgaagtcggagatgaagaagcgccgagcccctcctcctccaggttcagggccacctgtgcaagacaaggcatcggaaaaggtatctcttgggtcacagattgatttacagaagaagaagcggcgagcgccagctccccctccaccacagccaccaccaccgagtcccctgatccccaaccgcactgaggataaggaggagaacaggaagagcacgatggtttattgctgtgcgtcattccctactcaggccaagcgcttctgatggacgggcctcttcctgacctcggacctttcccagtgtctcttctgccctggctctgattttcctgttgttcttcctcctttcaggataaaagggctcattgtatacccagaatttacttcctttggggtttacatataaatgcattaataacagagatttgtttgattgaggtttatatttttttgaaggaggtaaattatatgcaaattttaggttgataatattcacctgtctgaaattcactgatacttggaaatgttcctgtgaagaactctgctttattttaattcattattaattcatgtttttcttattggatattcagttccagaatttattgccaatttttcttaaaactagattgtatccataaattgaccagtatagtcaatttggatagaactgaaactttctgtctacctggtaaaactaagtgcctaaaaacatgaactataaatgtagttactaggaactcacaacttatatatactatccattcaatgatacataggacccaatgtctttgtgtttttgaggttttcctgttactgtgtactttgccattttacatagttcactaaaaagaaagaagtgggagaagaaggggggtctattcattattctatattatgattctcttcattattctgttctcttcattattctattcatttcttcacccatttattcactaaacagtgacatagtacttacttgatgctaggtattacaccagttttgtgggctataagagtgaataacaagcacgtgacctt

SEQ ID NO: 267 - DNA, 684 bp, Homo sapiens
tgtagatacagagtagctaattctaaaattcatatggaaggcaaagaaactaaattagccaaaacaattttgaaaaagatttcaaaaaaattttgaaggaatcatgctgcccagttttaagacttactataaagctgtgataatcaaggcaatctggtatttatgaaaggataaacacatagatcaatggaataaagtccaaaaccagactcacataaatagcaattgatttctgacaaaggtgaaaagacaactcaatggggaatggagagtttttcaacagatgattttaaaacaactgaacatccatatgcaaaaaaataaacctacctaaatttcacagcttatacaaaaattaacctaaaatggatcacggatctaaatgtagaactaaatttataaaatttttagaagaaaaaaatccataggccgggcacggtggctcatgcctgtaatcccagcacttcagaggctgaggcgggcagatccgttgaggtcagttcaagaccagcctagcctatgtggtgaaatcccaactctactaaaaataaaaaataaaaaaaaaatgggctgggagtggtggtgcacacctgtagtcccagctacttgggagactgaagcacaagaatcacttgaacccagcaggcagaggttgcagtgagtggagattgtgccactgcaccc

SEQ ID NO: 268 - DNA, 453 bp, Homo sapiens
ggtcgacgatttcgcccgccgtcggacgaggagcgggagccgtgggagccgtggacgcagctgcgcctgtcgggccacctgaagccgctgcactacaatctgatgctcaccgccttcatggagaacttcaccttctccggggaggtcaacgtggagatcgcgtgccggaacgccacccgctacgtagtgctgcacgcttcccgagtggcggtggagaaagtgcagctggccgaggaccgggcgttcggggctgtccctgtagccggttttttcctctacccgcaaacccaggtcttagtggtggtgctgaataggacactggacgcgcagaggaattacaatctgaagattatctacaacgcgctcatcgagaatgagctcctgggcttctttcgcagctcctatgtgctccacggggagagaagattccttggggttactcagttttcgcct

SEQ ID NO: 269 - DNA, 525 bp, Homo sapiens
ggcacgagaactggtgcttaatttaatgccaattcatgatgtaggtttctaagcagcacataaaaggggctttttaggtagcactgagtactttactaaaaatacaaaaattagccaggggggggggtgcacgtctttaatcccagctactcagggcgggggccagggggtggggtagggtgggggctgagacaggagaagcacttgaacccaggaggcggaggttgcagtgagctgagattgtgctactgtactccaacctgggcaacaaacagagtgagacactgtctcaaataaataaataaatagataaataaaataaaataaaataaaaagaactcgaccctttttacaatagctaaaggaaaataaaatacttaagaatatacttaaccaaggaggtgaaagacctctacaaagaaaactacaaaacactgctgaaagaaatcacagatgacacaaacaaaaacacatcccaagctcatggacaggtagaatcaatactgtgaaaatgactatactgcc

SEQ ID NO: 270 - DNA, 880 bp, Homo sapiens
  misc_feature (1)...(880): n = a,t,c or g
cccagtcccacattgagccctgatcccatccaagtccatagacttggcctctgaccaaacctgaccctgcacttgtcacttaaggtggtcccatattcagctcagaccctgaaccgagctctgaccctggcttctgactgaatctgtgacagactaaggcctgaccctggccctataccacgtctccacccgtgtcctcaactgagtgctgaccccaaacctagacagccctacctgatccttcccccaggcctgtccccgccgcttcatctcaaaagttgaaggtgaggagccggtaaacaggtctggagcctggtctcagactcagcctgagcaagctcagtctggggtcattgggcctgtaaccccgggcaggcccttgttagggatgcagggtctcaccctaggggtataagggatttctgtgcccatcagaacttnnnnnnnnnnnnnnnnnnnnnnnnnnnnnnnnnnnnnnnnnnnnnnnnnnnnnnnnnnnnattttgctgttagcatatgtgatgaccttgacttcacctccctggcgccaatatcctcttctgtaaaatggcttatgcattacaaagtgaggtcctgccagtgactacacctagaggcattaagtgcctttgtggactcctgccctgcacctcacctctcccagctttttaaccccctgaggaaccttcttaccttgagtccctcacccgctacaggccatccatgagcagatgaactgcaaggagtatcaggaggacctggccctgcgggctcagaacgatgcggctgcccggcggccgtcagagatgtttaaggtgaggctggctcagggtcgtggcctagcatctttaagttctgggatccagtctggggtagggag

SEQ ID NO: 271 - DNA, 1066 bp, Homo sapiens
  misc_feature (1)...(1066): n = a,t,c or g
tgaccctcgtaagngcgttggaattccctcacctgtgtggtcctcaccttcctgggccaccgcctgctgaaacggtttctggtgccaaagctgaggaggtttctcaagcctcagggccatccccgcctgctgctctggtttaagaggtgagtgagctcacagccccgaggcagggcaggggagggcccctgagctgaggggttggctccagggttatggccagggctggaggaggaggaaggctctgtgtcatggagaactctctggcgccccagggcaggagccagtgggtggcttcaaacaaagcagcatctttgtggtgtttcaccagttcttagtcccagttacagcaggtgactgtggtggacgaaaactggactcaacagtttcctccattcagggatcccaggccatggagcaaggagggcccgaatcagtacctccctcagatcacctggacagtgtgagacaaaaagccgcagggaccatccctggagggggattcagcaggctcgatcggggtccaggtgctggtatttttcattagcctccaggggattctgatgtagccagcagcgtccttggacaacagtttgagatctgctgcttttcaaactggattccttggagcgctggaaatctcagcgatgtcacagggcaggagagggaggttgtggagggaaaattcagacttcccgcccagcccaccatttcaccaggcagctctaaatttatgtgttttataagccaaggttcacacaaaaaagaaaattcgctggggggaaaaaaacagtttctatggcttaaaaaaaagtctgaagaccaccagtctatttcaatactctattttgttgatgaagaagctggtgaccaaagatacccaaagactaagtcagggggatgcaggggtacaggggtgcctctcactttcccaaagtgagatccacataccacagcaaaatgatttgagccagcctgtggatgaacacatttaaaattttatttataaatacatttactgttacatttgacttctctttattaaatacatttgtgatttataaaa

SEQ ID NO: 272 - DNA, 659 bp, Homo sapiens
tacggggaattcgtcacctaccaaggggtggctgtgacgcggagccggaaagaaggcatcgcacacaactacaaaaatgagacggagtggagagcgaacatcgacacagtgatggcgtggttcacagaggaggacctggatctggtcacactctacttcggggagccggactccacgggccacaggtacggccccgagtccccggagaggagggagatggtgcggcaggtggaccggaccgtgggctacctccgggagagcatcgcgcgcaaccacctcacagaccgcctcaacctgatcatcacatccgaccacggcatgacgaccgtggacaaacgggctggcgacctggttgaattccacaagttccccaacttcaccttccgggacatcgagtttgagctcctggactacggaccaaacgggatgctgctccctaaagaagggaggctggagaaggtgtacgatgccctcaaggacgcccaccccaagctccacgtctacaagaaggaggcgttccccgaggccttccactacgccaacaaccccagggtcacacccctgctgatgtacagcgaccttggctacgtcatccatggggtgagtcgcctgctggaggcaccacctccaggggctccctccccaggctctgggtcttc

SEQ ID NO: 273 - DNA, 412 bp, Homo sapiens
acgcgacttctcgggtcgacccacgcgtccgcacatataacacatcacgcaccttttgagtggctaccttggttctcgcctttcttttcaagagaccattcttcaacagaactgtaaggattcttcttggctgaatcagatgtgacgcatcccacttctgcgtttgaggtctagcacataccgctccaagggctttgacgtcacagtgaagcactcacacggaagctggacgggcttcggtggggaagacctcgccaccatccccaaagggttgaatacttattttcttgtcaacattgccactatttttgaatcaaagaatttctttttgcctgggattaaatggaatggaatacttggcctatcttatgccacacttgccaagccatcaagttctctggagaccttcttc

SEQ ID NO: 274 - DNA, 522 bp, Homo sapiens
gaattaagagttactccgggccaaatggccggagttgtcagatctggcagcgtcttcgctggggctccagggagctgctgctggggtggaagctctcacactctttctccacgtgccctttccagttccctgacatcgtggagttctgcgaggccatggccaacgccgggaagaccgtaattgtggctgcactggatgggaccttccagaggaaggtaaggcgtctgatccaggtctggagctgggattgaggagggcaagaggcttctggatgggcacagagacaccagctctgggtgaccagggctcagccaccacagggttacggccgagctgctcaggccttggctgagccaagggactccatggtctgtgcagactgcgtgccatctgttgcggcaggtgctttgaattggcaaagggacagagccgggcatggtgctctgggggttgggggaaggactaaggtcagagcaaactctcctggcttcagtacttgtgaatcagagggtttaaaagaaa

SEQ ID NO: 275 - DNA, 650 bp, Homo sapiens
  misc_feature (1)...(650): n = a,t,c or g
gaattctgcttatgcaccaatttgcagctcctgcaaccatgatgcagcctcacccggacctttcaacattttccctttcacctaaaactgtatttttctctgctaagaccggctaccctactttcattttcctttcactcttcttggctcttttgggccttttaggaatttgggatgattcaggctctgacaggcatggtactagatttattttaggctgctcttttgctgttgtccaacaggccaaggagagatttaaatgatttatccaatatttgctaaatagtcatgtgtttcatttatcccatatatagttcagccttaatattgtttttgttttgatttgttacactagtgcatacatagagacgtgaagccagaaaatatcctcatcacgaaacattccgtgattaagctttgtgactttggatttgctcggcttttgactggaccgagtgactactatacagactacgtggctaccaggtggtaccgctcccctgagctgcnggtgggggacacgcagtaccggccccccggtgggatgtttggggcaattggctgtgtctntgctgagctngctgtcagggaagtgcctctggtggccaggaaaatcggaatgttggatcagctgtatctgattaggaaga

SEQ ID NO: 276 - DNA, 497 bp, Homo sapiens
cccttgatgaccatctagtcagtgcggtggaattcccatgacagacgtatctgactggtcatgtggtcagcaagcctcgcctttggtcaggccctggagggtacagctgacccatagggccacttccatggcactgggcaagtggctgtattggaaatgaagtcgttgcccccgatttctttggggccaggttgagctttcctgcccagagcacggaggctaaagggggtgggctttggactggattggggctgacctcagcctacacctgcaggaggaggtggagacagaggtggcctgggaggaatgtgggcacgtcctactgtcactgtgctacagctctcagcagggtggcttgctggtaggtgtgctgcgctgcgcccacctggcccccatggatgccaatggttactcggaccccttcgtgcgcctgtgagtgaactggggtaggcaggcgggaggtgaggataaggcggtgactcctcacctctccaggg

SEQ ID NO: 277 - DNA, 428 bp, Homo sapiens
tggtggaattctcgccatggaatatgcaccaggcggcactctggctgagttcatccaaaagcgctgtaattccctgctggaggaggagaccatcctgcacttcttcgtgcagatcctgcttgcactgcatcatgtgcacacccacctcatcctgcaccgagacctcaagacccagaacatcctgcttgacaaacaccgcatggtcgtcaagatcggtgatttcggcatctccaagatccttagcagcaagagcaaggcctacacggtggtgggtaccccatgctatatctcccctgagctgtgtgagggcaagccctacaaccagaagagtgacatctgggccctgggctgtgtcctctacgagctggccagcctcaagagggctttcgaggctgcgaacttgccagcactggtgctgaagatcatgg

SEQ ID NO: 278 - DNA, 427 bp, Homo sapiens
gtccagtgtggtggaattcaccaggtgtccggggcagtggtagtatctgggctgctgcagggcatgatggggctgctggggagtcccggccacgtgttcccccactgtgggcccctggtgctggctcccagcctggttgtggcagggctctctgcccacagggaggtagcccagttctgcttcacacactgggggttggccttgctgtacgtgagtcctgagaggcgtgggatggtgcccagtgggggtgtatggggggactaggggagggcagaactgctggtcctatcagattcagcagcgactggaatagggacatattttatatttggaatccaagacttttccttgattcatctggtctccttgaatttcacactgttttctgctgtcccccaaggtcacttcctattccttccatgggagt

SEQ ID NO: 279 - DNA, 561 bp, Homo sapiens
cccagaatgaccgggtcgacccacgcgtccgcacccagctatggaggcagctgcaggaacaacttgttttaccgagaagaaacctacactccaaaagctgagacggacgagatgaatgaggtggaaacggctcccattcctgaagaaaaccatgtttggctccaaccgagggtgatgagacccaccaagcccaagaaaacctctgcggtcaactacatgacccaagtcgtcagatgtgacaccaagatgaaggacaggtgcatagggtccacgtgtaacaggtaccagtgcccagcaggctgcctgaaccacaaggcgaagatctttggaagtctgttctatgaaagcttcgctagcatatgccgcgccgccatccactacgggatcctggatgacaagggaggcctggtggatatcaccaggaacgggaaggtccccttcttcgtgaagtctgagagacacggcgtgcagtccctcaggtaactactctgtgatcggggctctgtgaaacggttttcctgtttatgacggtgttgttgaaattttgaaaaataccacaca

SEQ ID NO: 280 - DNA, 792 bp, Homo sapiens
atttttgatgccatgtggctacattggttttagaatactaataaaatccattgcttttaaaataaataaataaaccccatagcacatcctccatacaacatctgttgtccctcaagatacaattgttaccactatcatctaaccattattttatgataactttaaaatatcaacttggcaagaaaatattccacaaaacacactctgcctttttactttaaagagtccttggctacctgggccaatattattctcatttgtaggatttaggttccacagaatataatatgtgcctttttctgtgttccctgcagatttgcaagtaccatccctttttggggccttactttgcacctccagcatctgggaaacaatgttttcctgttgcagactctctttggtgcagtcaccctcctggccaattgtgttgcaccttgggcactgaatcacatgagccgtcgactaagccagatgcttctcatgttcctactggcaacctgccttctggccatcatatttgtgcctcaagaaatgcagaccctgcgtgtggttttggcaaccctgggtgtgggagctgcttctcttggcattacctgttctactgcccaagaaaatgaactaattccttccataatcaggggaagagctactggaatcactggaaactttgctaatattgggggagccctggcttccctcgtgatgatcctaagcatatattctcgacccctgccctggatcatctatggagtctttgccatcctctctggccttgttgtcctcctccttccg

SEQ ID NO: 281 - DNA, 1047 bp, Homo sapiens
ggtcttggtttcaagggatcatatgaaaagtgcccagcagttcttccagttggtgggaggatcagctagtgaatgtgatacaataccagggaggcagtgcatggcttcctgtttcttcctgcttaagcaatttgatgatgttttgatttacctcaactcatttaagagccacttctataatgatgacatctttaactttaattatgcccaagccaaagctgcaacaggcaataccagtgagggcgaagaggcgttcctcttgatccaaagtgagaagatgaaaaatgattacatttacctcagctggttagctcggggctatattatgaataagaaaccaagactagcctgggaactttatcttaagatggaaacctccggcgagtccttcagtctcttacagctcattgctaatgactgctacaagatgggccagttttactattctgccaaagcttttgatgtccttgagaggctggatcctaaccctgaatattgggaaggcaaacggggtgcctgtgtgggcattttccagatgatcatagctgggagagaacccaaagagacccttcgagaagtgctccatttactgagaagcacaggtaacacccaagtagaatacatgatccggatcatgaagaaatgggccaaagaaaacagagtgtccatcctaaaatagcgccagtgcactaggaaccagcttctactttgacataaaactggaaatcattttcactccagctttaatctgtgatacagggctctgttttattgacattttccttccttgctctttaagcctcaaggtcagagactgacttgctgagacttagtctcctggctgaacagagtgccatagtctgtgaccctgtatgatcctagtagcaataagattttggacttatctggtgcctttcttccaaaaatgctcagagtacttttatgcaatttactgactttaaggaaaacagtataacttttttttgttagcattttatggcattgtctcctggctgcaataacaaacatctttgatgttcaagaatc

SEQ ID NO: 282 - DNA, 357 bp, Homo sapiens
ctttaaaagtttctgatgaattagtgcagcaatatcaaattaaaaaccagtgtctttcagcaatagcatctgatgcagaacaagaacctaaaattgatccatatgcatttgttgaaggagatgaggaattcctttttcctgataaaaaagatagacaaaatagtgagagagaagctggaaaaaaacacaaggtaagagaaatcacagtacaccaaagggtcactgttgattttgtagcactgcatatagtaacactcttactaccacagttatctcacttcttttgtcttagaatagaaagagtaatcatttatttagaaaaacctatttttgcccggctgcggtggctcatgcctg

SEQ ID NO: 283 - DNA, 536 bp, Homo sapiens
ctggggtgccccgcaacctgccttccagcctggagtatctgctgttgtcctacaaccgcatcgtcaaactggcgcctgaggacctggccaatctgaccgccctgcgtgtgctcgatgtgggcggaaattgccgccgctgcgaccacgctcccaacccctgcatggagtgccctcgtcacttcccccagctacatcccgataccttcagccacctgagccgtcttgaaggcctggtgttgaaggacagttctctctcctggctgaatgccagttggttccgtgggctgggaaacctccgagtgctggacctgagtgagaacttcctctacaaatgcatcactaaaaccaaggccttccagggcctaacacagctgcgcaagcttaacctgtccttcaattaccaaaagagggtgtcctttgcccaccttgtctctgggccccctttccttcggggaagcctgggtcgccccttgaagggagctgggacatggcacggcaatctttctttcccgctccacttcgaatgggggaagacc

SEQ ID NO: 284 - DNA, 440 bp, Homo sapiens
gtatcttatttgcggcgctgatctggagttcgttcgatgagaatatagaagcttcagccggaggcggcggtggttcgtccatcgacgctgtcatggttgattcaggtgcggtagttgagcagtacaaacgcatgcaaagccaggaatcaagcgcgaagcgttctgatgaacagcgcaagatgaaggaacagcaggctgctgaagaactgcgtgagaaacaagcggctgaacaggaacgcctgaagcaacttgagaaagagcggttagcggctcaggagcagaaaaagcaggctgaagaagccgcaaaacaggccgagttaaagcagaagcaagctgaagaggcggcagcgaaagcggcggcagatgctaaagcgaaggccgaagcagatgctaaagctgcggaagaagcagcgaagaaagcggctgcagacgcaaagaaa

SEQ ID NO: 285 - DNA, 119 bp, Homo sapiens
gcgatggaaatcgtccacgagccgcgcgacctcgagcgttacatgcgcgaggccgtgaaggtgtcgaacgattcgccggtgctgctcgaccgcttcctgaacgacgcgatcgagtgcga

SEQ ID NO: 286 - DNA, 398 bp, Homo sapiens
aaacaggggatttaagtgtgtcttttgtgtttgcaaggcactaacaccactcccgtctgtatttaaatgctgtccccaggttacgactatggctatgtctgcgtggagttttcactcttggaagatgccatcggatgcatggaggccaaccaggttgctttatacttcggtcaaatgatgctggaaggatatatttttttatatatggggagggagggtttcaaatgattttactttggaaaggtacaagaagtctatctgtggagcatactgtattccaaccatcggttgtgaggaaaatctttaaaaaggctggaaagctttctctagaaaacttaatgggcacagagtgcattttaaaagctagagcccagttgcttttggactagattccaaaa

SEQ ID NO: 287 - DNA, 1177 bp, Homo sapiens
  misc_feature (1)...(1177): n = a,t,c or g
cccacgcgtccgctcctctgggggtcaagaggaccccgccagccagcagtgggcacgaccgcgcttcacacagccctccaagatgaggcgccgggtgatcgcacggcccgtgggtagctccgtgcggctcaagtgcgtggccagcgggcaccctcggcccgacatcacgtggatgaaggacgaccaggccttgacgcgcccagaggccgctgagcccaggaagaagaagtggacactgagcctgaagaacctgcggccggaggacagcggcaaatacacctgccgcgtgtcgaaccgcgcgggcgccatcaacgccacctacaaggtggatgtgatccagcggacccgttccaagcccgtgctcacaggcacgcaccccgtgaacacgacggtggacttcggggggaccacgtccttccagtgcaaggtgcgcagcgacgtgaagccggtgatccagtggctgaagcgcgtggagtacggcgccgagggccgccacaactccaccatcgatgtgggcggccagaagtttgtggtgctgcccacgggtgacgtgtggtcgcggcccgacggctcctacctcaataagctgctcatcacccgtgcccgccaggacgatgcgggcatgtacatctgccttggcgccaacaccatgggctacagcttccgcagcgccttcctcaccgtgctgccagacccaaaaccgccagggccacctgtggcctcctcgtcctcggccactagcctgccgtggcccgtggtcatcggcatcccagccggcgctgtcttcatcctgggcaccctgctcctgtggctttgccaggcccagaagaagccgtgcacccccgcgcctgcccctcccctgcctgggcaccgcccgccggggacggcccgcgaccgcagcggagacaaggaccttccctcgttggccgccctcagcgctggccctggtgtggggctgtgtgaggagcatgggtctccggcagccccccagcacttactgggcccaggcccagttgctggccctaagttgtaccccaaactctacacaggacattccacaccacacacatacacacaccccccaccctcctgccaattaaacagtagccattccccnaaaatnnnnnnnnnnnnnnncnnnnnnnnnnnnnnnnnctcggcccccgcctattcaccg

SEQ ID NO: 288 - DNA, 100 bp, Homo sapiens
tgaattttcattttacagggaagtgtttgtttatgtcagggctcagtgaggtccagctgacccatatggatgatcacactctaccagggtattgaagctc

SEQ ID NO: 289 - DNA, 406 bp, Homo sapiens
cggcacgagcggcacgagagtcagagggttttaatttacttgtgaagctcacactattgaaactaattgcaatgcttgactttattttctttagagtccaagaaagagaaaaacaaggcatagcacaaatccccctctagagtgtcatgttggttgggtaatggattccagagaccatgggccaggaacatcctctgtcagcacttcaaatgcttcaccttcagaaggcgcaccactagcaggaagttatggatgtactcctcattcattcccaaagttccagcatccttctcatgaacttttgaaggaaaatggctttacccaacaagtgtaccacaagtatcgtcgaagatgcctaagtgagagaaaacgcttgggaattggtcagtcccaagaaatgaatacc

SEQ ID NO: 290 - DNA, 359 bp, Homo sapiens
cccggcagcggcggcagcgcggggggccgagacggcagtgcctaccagggcgcgctgttgcctcgagaacagttcgcggccccgcttgggcggccggtggggacctcgtactccgccacctacccggcctacgtgagccccgacgtggcccagtcctggactgccgggcccttcgatggcagcgtcctgcacggcctcccaggccgcaggcccaccttcgtgtccgacttcttggaggagttcccgggtgagggtcgtgagtgtgtcaactgcggggccctgtccacaccgctgtggcgccgagatggcaccggccactacctgtgcaatgcctgcggcctctaccacaagatgaatgg

SEQ ID NO: 291 - DNA, 954 bp, Homo sapiens
cccagatcatcgacatggtgcgttgtggtggtggtacagctgtggagtcttacctgtcacagtgtcaagaaatgaaggggatgaacggaaccaggtgctgaccctgtatctgtggatacggcaggagtggacagatgcctacctacgatgggaccccaatgcctatggtggcctggatgccatccgcatccccagcagtcttgtgtggcggccagacatcgtactctataacaagtactgcctatctgggcccctcctctctcttacccctctctagacttgcccttagctgtgggggtgtagtgatcccctctccctaccacataacctggttgccacgctgccctggaagcttttccccaggacccttctaagctgccaagcactcagcccctccatggcacccccactttaggctatcccaggccagcccaggctgaacgtctcctcggaacctactgtgtggtccagggcagatgtctgaatcacaagggcctctctagggcacacttttagctctaagtctctcagggctcccccaagagcctgtctaagggtctctttcctccaggacatagccctctggaacactgctttatgtctccttgaccagttccgtgtctcccagccagcacatagctctgcatattttctctggggcccttctacaagttttgcagatgtcccccaagggaagtcactgtgtgtcccggagctacctctgggttctgcagaggcctttttatacatcctctggctacgtctgtgtcccttctggcgccttcaggcaccaccccttccaggcctcgaaaggcagcgggtctctctaggtgcactccaccctctgtgttgctttgttctgaaaacaagaatcaaattaacgaaaaaaaaacaagcacaagtttatttatttatttgagacacagcctgggcaagagagtgagacttcatctc

SEQ ID NO: 292 - DNA, 595 bp, Homo sapiens
tacgcactgactggtgcgttggttattgtcaccgggatggtgatgggaaatatcgccgattatttcaatctgcctgtttccagtatgagtaataccttcaccttcctcaacgccggcattttaatctctatcttcctcaacgcctggctgatggaaatcgtcccgttgaaaacgcagttacgttttggctttctcctgatggtgctggcggttgccggtttgatgttcagccacagcctggcgctgttctcggcggcgatgttcattctcggggtggtcagcggcatcaccatgtcgattggtacattcctggtaacacaaatgtatgaagggcgtcagcgcggttcccgcctgttatttaccgactccttcttcagtatggctgggatgattttcccaatgatcgccgcgtttctactggcgcgcagcattgagtggtactgggtttatgcctgcatcgggctggtgtatgtcgctatttttattctgaccttcggctgtgagttcccggcgctgtgcagccatgcgactaagttgggtaccgccagtagttatcccagtctggacgttgtacagctacggacattgaatgcgt

SEQ ID NO: 293 - DNA, 552 bp, Homo sapiens
  misc_feature (1)...(552): n = a,t,c or g
tcttgaagagccgctgctgatcaacaccagcttaagcaaagaacagcgtcgggaaaaagccctgtcgatgatggcgaaagtcggcctgaaaaccgagcactatgaccgctatccgcatatgttctccggcggtcagcgtcagcgtatcgccatcgcccgtggtctgatgctcgacccggatgtggtgattgccgatgaaccggtttccgcgctggatgtttcagtgcgcgcgcaggtgctgaatctgatgatggatttgcagcaggagttggggctgtcttatgtctttatctcccacgacctgtcggtggtggagcacattgctgatgaagtgatggtgatgtacctgggccgctgcgtggagaagggaacgaaagaccaaatcttcaataacccgcgccatccgtacactcaggcgctactttccgcgacgccgcgcctgaacccggacgatcgccgcgagcgcatcaagctcagcggtgaactaccaagcccactgaatccaccgccgggttgcgccttcaacgcccgctgttgtcggcgnttcggccc

SEQ ID NO: 294 - DNA, 426 bp, Homo sapiens
tagcgccacccttgaacgggtactaaatcaccctgacgaaacgcaagcccgacgcttaatgacgctggaagatatcgtcagtggttattccaatgtgttgatttccctggcagatagtcagggtaaaacggtgtatcactcccccggtgcgccggatatccgcgagtttacgcgtgacgccatacccgataaagacgctcagggtggcgaggtgtatctcctttccggcccgacgatgatgatgccaggccacggtcacgggcatatggaacacagcaactggcggatgattaacttgccggttggcccgttggtggacggcaaaccgatttatacgctctacatcgcgctttcgatcgattttcatcttcattacataaatgatttgatgaataaacttattatgaccgcatcggtaatcatcat

SEQ ID NO: 295 - DNA, 340 bp, Homo sapiens
gggtgctggcgtatccggggattaaagtctcgacggcagaagccagggctattttaccggcgcagtatcgccgccaggattgcattgcgcacgggcgacatctggcaggcttcattcacgcctgctattcccgtcagcctgagcttgccgcgaagctgatgaaagatgttatcgctgaaccctaccgtgaacggttactgccaggcttccggcaggcgcggcaggcggtcgcggaaatcggcgcggtagcgagcggtatctccggctccggcccgaccttgttcgctctgtgtgacaagccggaaaccgcccagcgcgttgccgactggttgggtaaaat

SEQ ID NO: 296 - DNA, 281 bp, Homo sapiens
cgggcagcagcagcgcgtggcgctggcccgcgcgctgatcctcaagccgaaagtgctgctgtttgatgagccgttgagtaacctcgacgccaacctgcgtcgcagcatgcgcgacaagatccgcgagttgcaaaagcagtttgatatcacctcgctgtacgtcacccacgatcagagcgaagcctttgcggtttctgatactgtgctggtgatgaacaaggggcacatcatgcagatcggctcaccgcaggatctccgggtacggagattgaattggtaat

SEQ ID NO: 297 - DNA, 155 bp, Homo sapiens
tggcggtgcattacctagagcgggtgagaattgccgaacatgcgcataagtttcccggacagatttcaggtggtcagcagcaacgcgttgccattgcgcgttcgctgtgtatgaagccgaaaattatgttgtttgatgagccaacgtcggcgctc

SEQ ID NO: 298 - DNA, 217 bp, Homo sapiens
gctccctatgacgccgaaaattattttgattatgacaatctgaataacggaccttctttgcagcactggtttggcgtcgattcactggggcgtgacattttcagccgtgtcctggttggtgcgcaaatctcgctggcggcgggcgtgtttgccgtgtttatcggtgcggcgatcgggacgttgctgggcttgctcgctggatattatgaaggctggt

SEQ ID NO: 299 - DNA, 568 bp, Homo sapiens
aggtattctgtctgatcgctgaccttgacccgatcgatgagcttgtggacttcccgatcgtttacgcttctgcgctgaacggtatcgcgggtctggaccacgaagatatggcggaagacatgaccccgctgtaccaggcgattgttgaccacgttcctgcgccggacgttgaccttgacggtccgttccagatgcagatttctcagctcgattacaacagctatgttggcgttatcggcattggccgcatcaagcgcggtaaagtgaagccgaaccagcaggtcactatcatcgatagcgaaggcaaaacccgcaacgcgaaagtcggtaaagtgctgggccacctcggtctggaacgtatcgaaaccgatctggcggaagctggcgatatcgttgcgatcacgggccttggcgaactgaacatttctgacaccgtttgcgacacgcaaaacgttgaagcgctgccggcactctccgttgatgagccgaccgtttctatgttcttctgcgttaacacctcgccgttctgcggtaaagaaggtaagttcgtaacgtctcgtcagatcct

SEQ ID NO: 300 - DNA, 366 bp, Homo sapiens
caaggcacccgcgctgaatctcaaggttcctccaaagataaaacccgtcttgccttcgctggcctgaaattcggtgactacggctccatcgattacggccgtaactacggtgtagcatacgacatcggtgcgtggactgacgtcctgccagaattcggtggtgacacttggactcaaaccgacgtgttcatgactcaacgtgcaactggtgttgcaacctatcgtaacaacgacttctttggtctggttgatggtctgaactttgctgctcagtaccaaggcaaaaacgatcgtagcgatttcgataactacactgaaggtaacggccacggcttcggtttctctgctacctatgaatacgaaggg

SEQ ID NO: 301 - DNA, 199 bp, Homo sapiens
gcgatacctattccgtttctattccgctgggagccaccatcaatatggcgggcgcagcaatcactattaccgtgttgacgctggctgcggttaatacgctgggtattccggtcgatctgcccacggcgctgctgttgagcgtggtggcttctctgtgtgcctgtggcgcatccggcgtggcgggggggtctctgctgct

SEQ ID NO: 302 - DNA, 140 bp, Homo sapiens
gccaacgcgcagcaagggctgcccagtggtatcaccctgaagctaaataaccttgtcgataaaggcctggttgatcgtctgtatgcggcctccagctcgggcgttccggttaatctgctggttcgcggaacgtgttcgct

SEQ ID NO: 303 - DNA, 441 bp, Homo sapiens
cgcgcgaatgacgctcatccccggcacacatctgctggaaaacatccacaacatctgggtgaacggggtaggcacgaatagcgcgccgttctggcggatgttgcttaacagctttgtgatggcgttcagcattacgctcggcaaaattaccgtctcgatgctctcggcatttgccattgtctggtttcgttttccgctacgtaacctcttcttctggatgatttttatcaccctgatgctgccggttgaagtacgtatcttcccgacggtggaagtcatcgccaacctgcagatgctcgacagctacgccggtttaacgctgccgctgatggcctcggcgaccgctactttcctgttccgcaagttaaatatgtcggggccggacaaggtggtgccagccgcgcggatctccgggtacggacctagagttcgtaagcaaga

SEQ ID NO: 304 - DNA, 402 bp, Homo sapiens
ctgtgcgaaatgtttgcgtgatgcggatgaatgcccctccggggcgtttgaacggattggtcgcgatatcagccttgacgctctggaacgggaagtgatgaaagatgacattttctttcgcacgtccggcggcggcgtcacgctttctggcggcgaagtgttaatgcaggcggagtttgctacccgttttttacagcgactgcggctgtggggtgtgtcatgcgccattgaaactgccggagacgcaccagccagcaagctattaccgctggcgaaattgtgcgatgaagtgttgttcgatttaaaaattatggacgcgactcaggcgcgggatgtggtgaagatgaacctgccacgcgtgctggagaatctgcgtttgctggtgagtgagggcgtcaacgt

SEQ ID NO: 305 - DNA, 346 bp, Homo sapiens
tacctgttattgtttgtctgcttccttgtgatgtctctgctggttgggctggtgtacaaatttaccgccgaacgcgcgggcaaacagtcgctggatgatttgatgaacagttcgctgtatctgatgcgcagcgaattgcgtgagatccccccacacgactggggtaaaactctgaaagagatggatttaaatctctctttcgatctgcgtgtcgagccactgagtaaataccatcttgatgatatttccatgcaccgactgcgtggcggcgaaattgtcgccctggacgatcagtacacgtttttgcagcgtatcccgcgcagccactacgtgctggcagttggtc

SEQ ID NO: 306 - DNA, 207 bp, Homo sapiens
gttgaattattcctcagcgatgaaggcgatgatgtggtgattgaagtcgccgatcagggctgcggcgttccagagtctctacgagacaaaatatttgagcagggggtcagtacgcgtgctgacgagcccggtgaacatggcattgggttgtacttgattgccagctacgtaacgcgctgcggtggtgttatcactctcgaagataat

SEQ ID NO: 307 - DNA, 214 bp, Homo sapiens
tcgacgccattatcgcccccgatgccaacgccctgcccgctgccgcacaagccgcagaaaacttgaaaaatgacaaagtagcgattgtcggattcagtacgccaaatgtgatgcgcccgtatgtagagcgcggcacggtgaaagaatttggcctgtgggatgtggttcagcaaggcaaaatatcagtgtatgtggcggatgcattacagtaaaa

SEQ ID NO: 308 - DNA, 129 bp, Homo sapiens
tacatcgtagtgacggggaaaacacattgcggtacgccacttactaccgttacaggagacgcaacgcaatcgggttatctgacgctgaacctgcctgaaatgtgggaagtgtcaggttataaccgtgtt

SEQ ID NO: 309 - DNA, 358 bp, Homo sapiens
  misc_feature (1)...(358): n = a,t,c or g
gccggttttgccgcatcaatggtgcttagcgatgactcaacgtaccagtgcgccgactgcaaatctgcccgccgggccagtaaggagtaccccagttcatcaagaagctggcttgccactttcggcaacgcgaccggattaagcttcaatgactttgtctggttatttgtaagtgcgcttaaccgtgcctcaataattttcattttccccgcgacatcgttgagctgctgccgggttttgctggcattaatatcgggttccacaccttcaactgaagaagtaatcccgttctgatatagctggcgatcggtcgcgataatggcgntctgctctttttctatttgctgcaagaccgtgg

SEQ ID NO: 310 - DNA, 253 bp, Homo sapiens
tggcggccttcctgagagaatattgccgaggagtacgcgactaaacgctatcgttctaacgtcatcaactgggggatgttaccgctgcaaatggcggaagtaccaacctttgaagtgggggattacatttacatccctggcattaaagcggcgctggataatccgggtacgacgtttaaaggttatgtgatccatgaagatgcgccggtaacggaaattacgctctatatggaaagtcaggaagccagaacag

SEQ ID NO: 311 - DNA, 304 bp, Homo sapiens
gctgcaaactgaaattggcagcatggtctatgcggtgaaaccaggcgatggttctgcgcgtgaacaggcggcgagctgccagcgtgtgattggcggtctggcgaatattgccgaggagtacgcgactaaacgctatcgttctaacgtcatcaactgggggatgttaccgctgcaaatggcggaagtaccaacctttgaagtgggggattacatttacatccttggctttaaagcggctaagtatagtccgggcacggcgtttacagtctatgcgatctccgggtacggacctcgaatctgataa

SEQ ID NO: 312 - DNA, 344 bp, Homo sapiens
actctagaggatctgctgatggcgttagatggagagcaacatcttcagcaacaggtatcggaaaaagtattagccgataatgtgttaattgcccctggttctgttaaacctgatgcgacattctggtcggccttaatccaggatcgctataacgtgatgacctgtattgaaaaagacgcctgcgtcctggtcgagcaagatctgaatagtgatggtcaggcggagcggatcctgtttgcttttaatgatgacagagtcattgtctatggctttgactcagacagaaaagaatgggacgcgcttgatatgagtttacttccgaacgaaataacgaaagaaaaatt

SEQ ID NO: 313 - DNA, 630 bp, Homo sapiens
agagtcaaatagcagatgcaggaagatgccaggtgaaagatgccggggtggcccagctcggctgtccctgctgcttgacctgcccactcgccctcttccccacccccgacaggtgattgacttcggatccgccagcattttcagcgaggtgcgctacgtgaaggagccatacatccagtcgcgcttctaccgggcccctgagatcctgctggggctgcccttctgcgagaaggtggacgtgtggtccctgggctgcgtcatggatgagctgcacctgggctggcctctctaccccggcaacaacgagtacgaccaggtgcgctacatctgcgaaacccagggcctgcccaagccacacctgttgcacgccgcctgcaaggcccaccacttcttcaagcgcaacccccaccctgacgctgccaacccctggcagctcaagtcctcggctgactacctggccgagacgaaggtgcgcccattggagcgccgcaagtatatgctcaagtcgttggaccagattgagacagtgaatggtggcagtgtggccagtcggctaaccttccctgaccgggaggcgctggcggagcacgccgacctcaagagcatggtggagctgataagcgcctgctc

SEQ ID NO: 314 - DNA, 2285 bp, Homo sapiens
cgccttgtaaagaaacgagttgagtgtaggcagtgtgggaaggccggcaggaaccagtcaacgctgaagacgcacatgcgaagccacacgggggagaaaccgtacgaatgcgatcactgtggtaaggccttcagcataggctccaacctgaatgtgcacaggcggatccacaccggggagaagccctacgaatgccttgtctgcggggaagccttcagcgaccactcatccctcaggagccacgtgaaaactcaccggggagagaagctctttgtgtcatccgtgtggaaaaggctccagtgagcgcgcctgctttagagacacaggatgattcagaccggaaacagacctcgtgggtgtaagaggaagcctctgtgagctcgcaccttactgggtgcaaaagaatccacggaacttgggagaagtccagttcctgtaaaaactgggaagacgaggcgttctcatcccataggaggtttgtgagaactcacgccgggggtgaaaatgtacgtctgtagcatggagaagccttcagggtacattcagctcttaacaaacacaggaggacttaatggcagcttggcatttaatgtcaaaatccaagccgtggcatttaatgtcaaaatgacttcagaccacttctagccttctgggcccatgagtaataatgagcacactagggagcatctctgtaaacacagtggctggggaaacccttcctagtctcacttgattcctcatgacggaaatcacactaaagagagaaatcagtgaagtaaggaacgtggaaggtcatgaatgggccgcaaaccacggccagctgcttgtctttgtatggcttgccagctaacaatagtggttccatctttaaggaagaagaatgtttgatggagaaaatttgtggccaatgaagtctgaaatacttcctgtcatctgcccctttccagaaaaacttggccgacccttggtctacagcacgggttctcagtcgggcgacgatttggctgtgtaggcgtcatttggcaatgtctagagacatttttggtagttagaatggggggaagatactcctgacttgtaataagaagacatcagagatgctgctaagtcggctccagcacacaggagccccccacaacgaagagttagtgcccccaaacgtcactgttgctgaggttgaaaataatcatgcagtcattcctcaattactgcctccagcaattcctccatttttatgaatcttgtgagcacttacgctaggagaaatttcttttacaaaacttttaaaatacagttagtgctgataattcctatgtggaaatgattccagccatggtcccctcacttgagcatgtgaatattctcacggagagaagccccagcgagattttccggtgaatacgggattgcacttactctttcatcacggaaacagacccccgagagaagccccaacgagattttccggtgaatacgggactgcacgtactctatcatcatgaaaacagagccccgttcataaatttttcatctttatttttaaggttatactcctctaaataacccttaagcctcatcaagaaaggtttgtttatagtatttttactatagcttcatccttgataacgtcctaatttccttctggacaacctccttgaccaatggcatattgagatctatgtgacatgaggatatttctcagtaccactttgttactggtacctgatgcacacggattgcgaccagagcatgatgcctccatcaagtggtaatatgtttgcagcctgctgtccagccaagagtgacagatacttctagtgacttccccggtatccactctcatcttcttccaatatcaagagaatccaggttctgtcagattagtaaggtgtgctaatctaaattttaaaaaatctcttacaggttttcttgcagctggtaccatccatgtctcacagccctggccactgacagatcagcagatgtcaccacatgggcttctgagaaagctcttgaatggggatcgttcttaaacatgaattcctccctgtatgttttgttctttgctttacttttcaccttgcaaagagatccagtacctagtattggaagatccaccttaacgaccgtgcatatgaaaaccacagtctaaggaagtgactgcagaaagctcacagcgaccctggcctcccctgtggcctctttgagtgtctgcagcagccctggacttccagacttctatcacatgagaaaaaataaaactgattattggtttaaaaaaaaaa

SEQ ID NO: 315 - DNA, 1316 bp, Homo sapiens
ggctgtctatcagtggataaggtgggggctgtctatcaggggagaaggtgggggctgtctatcagtggagaaggtgggggctgtctgtcagtggagatggtgggggctgtctgtcagtggagatggtgggggctgtctgtcggtggagatggtgggggctgtctgtcggtgtagatggtgggggctgtctgtcggtggagatggtgggggctgtctgtcggtggagatggtgggggctgtctgtcggtggagaaggtggaagcttgtactcagagcaggggatatttagacttgaaggggccagggaggaaggtactggttctactaagccccatgttcactgggcagccactaagttagggaccgtgtgtgtaccgagtggattccgacaaagaagctgtctcaggagccccagccagctgcagaggggggcccaagctccaaggctgggtgtcaggtttgccaggtgctggctccgctaggggccgcaggctgcgctgggcgggactgggctgggctggtacctgtgcccggtgtcaggccagctgtagttgcagcggtcagctgccgctctctggccccatgcgaactgctgtgccaggtgcaccctgggggaccaggctgcctgggcttcctggaactggtgaagctgccgccacttcctctatgctgtctccagcaggcaattctgggtaaacgatcttcatttgcctataaagctgcacagctcacaggccttggaccgtttctgccccagccccagcattggccctttggacagactctgaaaccgtgcgcagaacgcaccctgtcattacaaatgactcctggaggcagtccccgggggcctggcaggagcacctgtgtttctgtggggtctgaaaatgacagaccaatcgcttgaacccgggaggcggaagttgcagtgagccgagatcgagacattgccctccagcctgggcaacaagagcaaaactccatctcaaaaaaaagaaaaaagtgccgagtggagtcgtcacgcccgtaatcctagcactttgggaggcagaggtgggcggatcacctgaggtcgggagttcgagaccagcctgaccaacatggagaaaccccatctctactaaaaacacaaaaattagccgggcgtgtgcatgcctgtaatcccacctactcaggaggctgagggaggagaatcgcttgaaaccgggagccggaggttgcagtgagccgagatcgtgccattgcactccagcctgggcaacaagagcaaaaactccatctcaaaaaaaaaaaggagagagagaaaccgggaccgcaag

SEQ ID NO: 316 - DNA, 2486 bp, Homo sapiens
ttttttttttttaaacaaaactttattggtaatagttttcaaatatgtttacaacagcacactgttcaagaggaagtctcgtccttcgcagcacacaggttgaatcgcccccgcacccacccggggccccaccccaggcctgagaactcctcctgggatggggagaagttatgagagggggaaatacggggatgaatggggtggctccccagcggctccccacttttctattacgagagaaaaaagcacaaatgagaaagtgggggagaggtgatggacagctgacagctaagctggaggaggggcgcccaggatgggggaggcggaagctggtgggtgagtaaaacaggcagcccctccccagcagctctagccttgaaccccgggccgtggcttggggggacttggcctcttctgttcccttttgcagggatgccctccccactcagctgagggaaggctggacgttaaaatctagcggagaataaaattaaggagttggggggaaacgctgctgggaggaaagacttgggcttggggctccccctctgtctttttgggggatgactcctctttggcagggagaggggcagctgctttgtctggctttcaaagcccaagggtgaagacaggtctgttggggaaaaagagagcggaggcttcctaaaggggcctagaccctcgcaggattggcagagaggattccccggggaggggcccaggggagattagcagcggggaggttcaaaccccagcgcctccctttccaaagtcagtctgcttctctttaaaatggatttgaggaatggggggacatgggaggggtgggagtagaggaaggagggagggaggcactggtggaacttaaataagattttaaattgttgtttttttaaaaaaattctagcaagcaacccactgaacatgtcactaaaaatctctccttcccaggcaggattactccgaaaggaaggttggcgcttcgttcatttgcccttagcaagtggggcctgtggttgggtgggatgggggtgtgggtgggggctggagttaagcgtgagcccctctttccataccctgtccctggatacaccagcaagacctggtctgactggagttgagaaactcgtttaaaacaggcagaagtgggctgggagggctgaggggctggggggctgtggggaaagagaaagggaaaagtgggagagggggcaggagggtgaaggggatgagggggagcagctggtgtttctgtccctctgattatctgggcttcctgctccccctacccctggagggtggggtgggggtgaaattagatgcaaggaactctggggccctctggctgttcaatccaaccctcccacccccccgaccaaaaaaaagaaaaaagaaaaaagaaaacccatgggggcacaggcatgcccctaaaactcagaaaactccttgcccaaacttctcattgatggaaaacccggatttcttcttcctcatagtcgtcaaagttaactcgtatccccagggcctttaaactttggtatgaagggagcttccaccttcctctggtagatggcaatccagtcagttgtggcaaaccacttgtggttcttgatatcgttgaccccattcttgaggttcccaaagcgcttggtgagatctacctgcaggaggttccgcagcaggtccttcaagtcagagctgaagtgggaagggaagcgcaccttcccagagacgatcttctcatagatctggatgggctggtctgcgaagaagggcgggtagccagcggccatttcatagataagaacccccagggcccaccagtccacggccttgttgtagcctttgctcaggataatctcaggggccaggtactcaggggtgccgcacaaggtccaagtgcggcccttcacgcgcttggcgaaaccgaagtctgtcacctgaatgtagccctgctggtcaatgagcagattctccggcttcaggtccctgtagatgagatccagcgagtgcagatactcaaaggtcaggacgatctgggccgcgtagaaacgggcatggggctcactgaaccttccgatccgccgtaggtgtgagaacatctccccgccgggcacgtactccatgaccatgtataagtttgagttgtccttgaaggagaactcgagtttgacgaggaacggaaagttgacagcttgcaggatgcgcttttcattcagggtgtgttcgatctgtttcagtttccccaccttctgttagtcgaggatcttcatggcatagtggttcccggtctccttgtgtttcaccagcatcacccgcccgaaggagcccgtgccgagggtcttgattcgttcaaactgatccaagtgggctgtgttctgagcgggactttcccattttttaagaaaatcttctttggctttggctaagaattctttcacgctctcctgctcgctgcccttcttggcggcggcggcgttgcccat

SEQ ID NO: 317 - DNA, 867 bp, Homo sapiens
ttttttttaagtttatataactttattataagtattaatttgtttgaattaagtttatataactttaatataagcattaatttgtttgaaatataaagtattataaaatattgtaattaagcttacagataatttttaaaatatatacattatgactaatataccaaaattatttatatgtacacatttatatttaatacccaaagaaaatttactaccacattgctacagtagatattaacctgacatgtttattaattgatcctataggtataattataggtcagcataattttacagtctattcttttattttactaaattaggaatgccactattcccggacaaataaatgcaggtgatgtggccacccaagaatcatagtagctcttcagttagctatcttgcaatctctgatataattctactatgtgaatagagtgaattccaattcttcatcaaaaagtgctggtggaggttgtcaggtgtgttccagtatagattcccaatccaacggccggcagatgggagagcagcagagatggaaattgtgctcagaataagccctctttctcataatacttgtatttctcatgctgagagtagctgtgcacttttggtgtttagagaagaacttctttggaagaatattttctggtcaatttgaccaatgttacatgtaatctgaattagtctgtaagattctttcaacctcttttcttctctcaatacggttttactcagactgagagctgtctttctcttcaatgctttgggaattcagtgctttgtgtctaagcccctattagtatcacatggtgtctgtgagtgaggggggctgtcaccgtgagaactcctggagctgct

SEQ ID NO: 318 - DNA, 1683 bp, Homo sapiens
ggcacgaggtaggaaccagtggtctatgtcccgaccactacttggcttgatagggcttaatgaaaaggtgagagagccagctccctggtgccaacccagaagcagtggcaaccacgcacttggtatcaccaagccctgggagaaatgtgtatagaaacaccccacggtggtgaaacagggaaaatgggtcatttactgagcaagtcccatttgtgctttcagtatcacataatcatttaactgttagaagtcagcatgtgtggtagctcacagacacaggataaaggagtgtttcccctaggcagtaagagaaacctttcaaggaaataatgtacctgggtatcagaggacctaagacctaagttctagttctagctctgctataaacaagtcttgagattctggtaaaagaaaggtctggataagatgacccttttaaagtgctttacaatttaaaaattcttgatattcttagtaggatgaagccatattatcccacaagtgcttgcctgaatttcttttttaagggtccaattttagtagacattccattcctccttagagaagaacattcttcaaccctgcagatgacggagggctaatctgccttcccctgcttctctaaccttctgttccactccttgccccacagtatttttctgacctaagaaacagtattgtgaacagccagccaccggagaagcagcaggccatgcacctgtgttttgagaacctgatggaaggcatcgagcgaaatcttcttacgaaaaacagagacaggtgagtataaagcgtcctgcctagaaatctcagacaattgctatttttcaaatcaacgaaacaggcagttgctttaaagtctttgacatctgtgtttggaggccatctaaagcaatgcaatccaatagaaaagtgagccatgttaaacaggcaaaattcattttaataatatattttatttaacccattgtatctaaaatattgtatcagtgtgtaatcagtattttaaaattgtgggttttcacattctttttgtactacatttccaaaatcctgtgtactttacatttaacagcatatctcagttcatacgttttcatcagaaatacttgatctgtatttagatttcataaatttacagttgacaaagtagattcctgtaatacccagattgtttcaaacacacctagggactttccagtaactgcattgagtatctgggctttgcaattaacttttaaattttatttaattttaattaatttaaaacaaggcattttaatttaaaattaagatgcagttggggagctgaatgttaaattgtatttaatttggattcatgttctcagtcacactggccataattcaggggcacggtagccatatgtggttaggcagccgccctattgggacaggcatagcactgcaccacctgggtcttgctggcattaaggaaatgaggatgggcttcattgggctttactggcccttcacgtgtgagggcaacttcctacttctgtcagtgagatttcttttgtgctgccatgagcccaaggtagccctcagggccccagatttgaccagatctctaagccaacttttctcttagagtcttaagactgaaattaactgatctttgaaacagaacccatcaattcatacattctacttcccatgctttaa

SEQ ID NO: 319 - DNA, 1606 bp, Homo sapiens
ttttttttttttcgtatttcaagggtttttattctgagcagtaggtacaaaaaataatgacatagttgtgtctaattctgtatagttcaggcaccctccacaggctgtcaatctctgatttgatctacttttaccagatttaacagatccttgaatttactttactgtatatacttccttcttgctcacattgggaatcaaactaatgctggaaacatgcatcttcagacttcattgaggaattccagattgagacacgctgggatgtggattgagtccatggttagagaagatggattaaatggaaacaaaacaggaaacatgtgcttggcatctaatagcagttgctgagggtcattccgctcttgtagttgtgcctggattgttcgtataaaggccactgttacccgttcttcaaattcattcaggggagtataaaggtttaaaattttgacaatctgctgggtgctgagggaggtacacagggagcagatagcctctgcgtcctcctgggttttcttctttaattgcaggagctgggctgcttggatcagaggttccatggtctgaactgctccactctggtgaaggtttcttccccgaagccactcctcaagctgacttatattgtacctgagttgcatgcctgtgctccaagagcagacgtccttccgcaggagcaggtcattaagagtcactgcgttgatcatgtagaagagctgtttgaatacctgcaggatgatctcagggtccaagccctggtcacacatgactgtatgaaaggcattcatctggcggatgatagcttccaggcggtatgagttatcctcatctgccatgctggaggagtgcttctgggagccagtgggcttcacaccagatagaccctgaatgctctaattttccaacatggcagaaactatcatcggctgtaacacaccctcggcaattttaatgagctgctggtagatctgaatggaaaggtcacgtcaggcacctgacggtattcggtgaggtcaaaattcttaagacagtgttcaattctgctttgcagtgttctgagtcatgaagccctcatccccgctgtactgcttcagacagtgaagaaggcgggcaggtgttggataaccagaatgacgtcatctcaaagtcatcattgtgctttttcaggactttcttaatgccgttgatggtggaggtcagcagggagtgcaccttgagatcgtcgttggtgtagtcccgcgtgccggatgcacatgtagaggatgtaggcggggagacagggcactgtgcccgacagcatctggggcttcaagtctgtcaccaggttccggatgaggagggcctcgtcctctttgtggtactccagcatgccctggaaatccttctctttccgctggaccgtgacctgcctgttgagctcatggcgcttcctctcactctgggccaatgcctgggcagcttctaggtcctgggctttcttcatgtaaatcttcagttgctttttgagcttcctctcattcttttccagcttttctaccagttctttaaggtccagattctcgttggtcagccgggatatttcctgctgaacgccgctcgtgcc

SEQ ID NO: 320 - DNA, 676 bp, Homo sapiens
ggcacgaggagaatactattcttaaagctgctgaagtgcaggtcccaccaaaatgagtagtaacacctgaagcaaaggcgtttatttgacgatgtttggcctaccaaaaggaggactgcattgatgcccagcaactggcctgtgaccccctacttgctgcattatatccaaaaattggtctttgtgagtagccctgctggggctgctattgcatcaacctttggggtgtccaacagctgttcttcgaattgagactgactccaaggccacaaactgttcaacacacacaaagtggacaaatagcatttagcagcaggtttggaacgtagagaatctgaatggatctgatgaaacctgaaccaggtgcttattttgttgcttttttcccatccactgagcatgacagcatggattctctttaaggagaaaccatgggcagctccagccaggcctcataggaaaaggcccggcatgaggttctggcgtcaatggccactgtgtatggctgctctgagtgaggaaaaaactaaaaagaaaaactggttccatgtactgtgaacttgaaaacatgcagactcacgggggttcctgatgcaatgcttcagatgaagattgtggacttgaaaatacagactagaaggccgggcacagtggctcatgcctgtaatctcagcac

SEQ ID NO: 321 - DNA, 1502 bp, Homo sapiens
ttttttttttttttctattgcttaatagaaaacatatttttattccgtactttaaaaatatagactttctagcaacttataaatttctattataataataaattgatactttgagccaagaaaacaatataaccaaaaattcatttgttccctttgtttaggggtgttttacatttatgcataattttgcttttataaaagatgattgttacaatcaggtatacaactacttggttatgtctaagttctgtctcttaaaatatgttcttttagagaattcatttaatcatcttattcttttcttcaattttctccaaacagtggtagaagtactatttgatagacagaataaagaaaattgtttttggccacacccagatcatactgatatctacagcatagtcctggctacaggggagctcaactctaactcgtgaagcgggcctggtttagaaagtaacaatgaggtagtaactcatgatagtgctagctgttatcaaaaattaacaactttaggtatttttgttttgggtttttgcggtttaggtacatccaaaatttcttcatagtctgcactcattccctttgcccagcgaccaactgtgaccattcgctctgaattctgactttcagggcaatctttctttaaatgttccacagagccacaaagtttgcaaccgccaccatcagcatagagtcctttgggattatcaggacaagatctagacaggtgccccatttctccacaaacaaaacattttgcaaaaggaaattcgccaagagccgggtctactttagccttacacttggttatttcgtgctctgtggacccacacctgtaacatatcccagtgcccatgtcttgattttcaagggcggcggggcaatctgcaattccatgaccaggttttctacaatggaaacacaccattgcatttttctttgccgcttgtctttttaatcttcttccttcccgtcgactgtctttctttaaagcaactgcaatttcttcccttacttcctcactgtctgttgctataatttgcccattgtgaaccatctgtgaattctgtcttaggtattccatgaatccattcacatcttcatttaagtactcttttttctttttgttctttttatgttttgcttggggtgcatcatttttgagggatagcctattggcttcaagttgtttacgctttggtaggttttggcttgttccctcaaaggatcccttcttcatgtcctcccatgatgttgcaggcaagggtctcttgttatatgtggtactaactcgggcccacctggtcataatttcatcagtggtaccttatcaatttttaagacaagcaggggtggttagccatcaacaacaaaaacaacaaaactaaagagacatgctatatcactatatgtcacatatgcccatatgttaaacttttaattattaaaacactttttatttcagttagatatctgtatacatatttaatggctataat

SEQ ID NO: 322 - DNA, 989 bp, Homo sapiens
gttggggtctcactctgtcgcctaggctggagtgcagtggcgtggatctctgctcactgcaagctccgcctcccgggttcatgccattctcctgactcagcctccggagtagcggggactacaggcgcacgccaccaggcccggctaattttttttttttgtatttttagtagaaacggggtttcaccgcgttagccagaatggtttctatctcctgacctcatgatccgcccacctcggcctcccaaagtgctgggattacaggcgtgagccactgtgcctggccaaacgctggtaggtttgggagtgagaccacattacatttaaatatatttacaatgttttctgctctattctttagtagacttttcctcacgtggtcctacgcatttctttctaagtttattttcatatagcctatccctgtctacaatttaaattgggatcttctatattctagttattatttgtaaataagaaaactactgacttttttctagtatattttctcagaataggattttctatttttctataaaatgaccaatgttatgaagcttcgtaagttttgtcaaagtgatacacacatacagcaaaaaatcaaatagtacagaagtataaaagcaacaacctctgccttgccccttctccaccttcaggtccccttcccagatacaataatttttagctttttatttttaattattctggttgttacctacataactctgggcaatatggaaaagttattgattttgtatattaatttcataatcagttaccttgatgaattctcttgtttctagtagtttttctttagggttttaaagggatacaatcataccatttgcagttagtaaccattttatctcctcttatttccaacttcgtactgttttctcttgtctaatttgtttttaattggtgggtacttctagaacaaggttaaataaaagtggtgttggtgggcgtccttatttctgatatta

SEQ ID NO: 323 - DNA, 1106 bp, Homo sapiens
tcggacgcgtgggcggacgcgtgggctcggtcgcttagtgtgtctcctagttcctatcctgaactacacactgaagttccactgtctgtcttaattctgggattgcttgttgttttcatcttatctgtctgttttggggctggtttattcgtctttgtcttgaaacgccgaaagggagtgccgagcgttcccaggaataccaacaacttagacgtaagctcctttcaattacagtatgggtcttacaacactgagactcacgataaaacagacggccatgtctacaactatatccccccacctgtggtacagatgtgccaaaaccccatctacatggcaggaagggaagggagacccagtagcctattaccgaaacctggcaaggagtttcagctattaggcaacctggaggagaaaaaagaagagccagccacacctgcttacacaataagtgccactgagctgctagaaaagcaggccacaccaagagagcctgagctgctgtatcaaaatattgctgagcgagtcaaggaacttcccagcgcaggcctagtccactataacttttgtaccttacctaaaagggcagtttgccccttcctatgaatctcgacgccaaaaccaagacagaatcaataaaaccgttttatatggaactcccaggaaatgctttgtggggcagtcaaaacccaaccaccctttactgcaagctaagccgcaatcagaaccggactacctcgaagttctggaaaaacaaactgcaatcagtcagctgtgaagggaaatcatttacaaccctaaggcatcagaggatgctgctccgaactgttggaaacaaggacattagcttttgtgtttgtttttgttctccctttcccagtgttaatgggggactttgaaaatgtttgggagataggatgaagtcatgattttgcttttgcaagttttcctttaaattatttctctctcgctctcctcttcccactcccacactgaaaaacaaagaagaaaaaagaaacaaaaccataaacaaaatctatgaagaaatgcattgtagaaacattcatgtccactgatggttcctaagaagagaagggaaaaagaaa

SEQ ID NO: 324 - DNA, 2366 bp, Homo sapiens
gcactatgtcacattgccgtggggcagcagatgaacctgcactggctgcacaagatcgggctggtggtcatcctggcttccacggtggtggccatgtcggccgtggcccagctgtgggaggacgagtgggaggtgctgctgatctccctgcagggcacagcgccattcctgcatgtgggggctgtggcagcagtcaccatgctctcctggatcgtggcaggacagttcgcccgtgcagagcggacctcctcccaggtgaccattctctgtaccttcttcaccgtggtgtttgccctctacctggcccctctcaccatctcctctccctgcatcatggagaagaaagacctcggccccaagcctgctctcattggccaccgcggggcccccatgctggctccagagcacacgctcatgtccttccggaaggccctcgagcagaagctgtacgggctccaggctgacattaccatcagcctggacggcgtgcccttcctcatgcatgacaccaccctgcggcgcaccaccaacgtggaggaggagttcccggagctggcccgcaggcctgcctccatgcttaactggaccaccctgcagagactcaacgctggccagtggttcctgaagactgaccccttctggacagccagctccctgtcaccctccgaccacagagaggcccagaaccagtccatctgcagcctggcagagctcctggagctggccaagggcaatgccacactgctgctcaacctgcgtgacccgccccgggagcacccctaccgcagcagttttatcaacgtgactctggaggccgtgctgcactccggcttcccccagcaccaggtcatgtggctgcctagcaggcagaggcccctggtgcggaaggtggctcccggcttccaacagacatcaggctccaaggaggcagtcgccagcctgcggagaggccacatccagcggctgaacctgcgctacactcaggtgtcccgccaggagctcagggactacgcgtcctggaacctgagtgtgaacctctacacagtcaacgcaccgtggctcttctccctgctgtggtgtgcgggggtcccatccgtcacctctgacaactcccacaccctgtcccaggtgccttcccccctctggatcatgcccccggacgagtactgtctcatgtgggtcactgccgacctggtctccttcaccctcatcgtgggcatcttcgtgctccagaagtggcgcctgggtggcatacggagctacaaccctgagcagatcatgctgagtgctgcggtgcgccggaccagccgggacgtcagcatcatgaaggagaagcttattttctcagagatcagcgatggtgtagaggtctccgatgtgctctccgtatgttcagacaacagttatgacacatatgccaacagcaccgccacccctgtgggcccccgagggggtggcagccacaccaagaccctcatagagcggagtgggcgttagctgaagacatgtctgtcccacctgtacctgacacagaagctggggagcctaggagagctggtggaagtgtgtctgaactcggagtgctctgggagcgggctccacagcctccttgtgggctccagccccttgtcagccgcagcctctcttgagggggactccctgtctcctgaggcccagctgggccaggactccatcctttcagatgcccctgcaggcctggggctccttctgggaagtatggggcctagggcttggtccccctcttctgaggccctctcctgtatcccgacctggaagctttgatgggtcatgggccatgccataccccctgtggcaatggagtgtgtggatgctcacctgtgccatctgtcctcctgtctgtgccaggaggcacctgagttctctgctgttatcctgccccaagggcctgggccgagcctctacctgaagcaactctgctcttcctgtcagtctcaaagcacaaggaggttcagcccaggaggaagccagctgcaatgtggagacacgtcctcctccccaacccacctcatgccaccgccaaccccctgccccaggagcgggcctgagccacgtcccctaggagcagctggagatggccaaaagagtgagctcaggactactggatcccatgcccaggtgtccagcagacctcaaggcagaagggtcacctaacccaggagttccacagactgatgtgacctcaggttcccacatcagtggccaccaggcagggcccacctggtagaagtgttctggatatggcccagggtgggtgtgtggctaagtgggcctgaacagagggaaccctagggcccttggccaatgtgattaaagctgccatcttg

SEQ ID NO: 325 - DNA, 1925 bp, Homo sapiens
  misc_feature (1)...(1925): n = a,t,c or g
ttttttgaaatctggtcccaaagtttcaaaagaatactaatgcaacaaaaagaaataacctctctgtataaagtgattatagagatgtgtgttgaggtaaacagcttcataaaaaccgttgagcagggaagcacagccactgctatagaaatttttaggtaagtctggtgctagcattattctacaaaactgtttacacccattataaataggggacagttcttattgctcctggagcttgtagctccaatctgttccagctccactgaaaaatgatttttctcaacaattggtagcaaagatttccaaatttacaaaaagtcattaccaatgcatcactttttgattaatttctgattgccatatagatatggactacagtatgcatgtccttgacaccaagtacagaaaaaaagcttagaaaagtcgttttatcaaagttcagttcaatgagaaacatgaaaaagtgcaaaatatgtacaattcctggcagttctcacacgggatttttttgactacagaccataaaagtttacatttgtgtaatgaaatgacgatggatttcacatcactgttaatatacaagtttttgcttcaaagtgcttactttatttataaaagagaagatcaagagggttgcaggaattttttttttttaacaacaaatcaatggtatgtgtcccaatctccttcttcctcttcctttagtgcaacatggcgcagcagcctcatggataaggtctgatttcaaaagacattcctgaaacctcacctacagcagcactctaggggtcccattaggggtggctctctttttcttctgcagccgattctgaacctttcgagattttactactttcattctcacctcaaaaacttcatgaatggccttccggaagcaatgaaaattatagtcaattagcccttttctttcaaagctttcctctctgacaaagcaaacgagagccaggaactttgtcacctcttttaaataaagcacggttgtattattaagctttatgatggctgtggattccttgtcatagggggttcctgctccatcttctttgagaccataaatacaagagatgtcaataaccacatctatcatatcacagcagagctcataggtttgcatatccaccggagtactatcagttgcaatataaattttactgaccacatcaaatagaaatgccttttcaattccagaatttgagataaagatgttcagcaaattctccagagttgggagttgtggaatcagtttctgaacaactttgctaaaagcttcaaatattgaatgatcatatatgcttgtcagataaaagctgaggtgaattttttctaatccagcatctgcaaggtcatcgtttgccctctggtgaatatctctttgggtttcaattttgtggtcatctgacagaccatccactttatgaataaacacctcgaagttgatgtcagtattcactttgtaggccctggtcaccgtgaggtggagcctggccagggcttccatgtaatcatcctgtgagtcaatgacaaatatcagtgctcctgttccccggaagatcatctcatagtcaaatgtagggtcaaaaaagtcaatctgtcctgggaagtcccaaatctgaaaattgacaaaggagctgttggaaacatcttcccggcatatcttattagtgctctccaagaacagagtttcgttgggagacattttgtgaaagacaactttctgaatagacgacttgccgcttctcctcaggcccatgagcaggattctcggcttcacttcagtgctgaaggggtcactgaagtccagaactccctcctctgtgccgctgtccggatcggcgtcggaggagtcgggcccgtctccgtagtccgctgaattccnccgcngtgactgagtctcattccca

SEQ ID NO: 326 - DNA, 1181 bp, Homo sapiens
ttttttttttttgagatttcccaggactggctttaatttgaaaaatctgattggggtctcttcccgtatcagagaaggaacagcccaagctatgaccccagggccagggaattcagtccccaccagaccctgtcattccatcactagggggtaattccaggctccccctgccagccctgagacaggaggacggatgtgaagttgcccaggactagattctgtctctccaaagtggcccaagccctgttctctgtactagggaagccagctgtgtcttttcgaggacagttggtccagccagcaggctcagttcagataccagacaaccattccagcacgagggctcagcgccctggccccggcggtcgctccagtgcctgtgtgcccaccagcacatccatgaggtagtccaattcggcctcgtccagctccggagcttcctccttgcccggcccatcctcagggcctggtttgaggccctcagaggctggtgcccaaagttcattgtcatacatagaggtgtcaatatcctcaaacaggccctcaagcccatcgtccagtagacagccagtggctgggcccagcaggtccaaggcacccaggctgggcgctgctcccccgatgctacggcctggtggcccctcgtctgccaagggttggggagcctgactcaggccctcaatgtggctgaggtcctccaggaggctggccatggaggctgaaagggcagcgtccgagcttgccagtaagttgtcagccacactgggggctgcaggtgggctaggcacaggtggcagggcagccgcgggtgccatggacgcctggatgcgccgcagagtgttcacgaccagcaccaggtgccgcaggtccggctcactctgctgcaggctgtggtggagcttgagcactgagaggtcaaagagggagctagaggccacggccgggggtgcctgtgccaccgctgcgtggccaggatctagccaccaggagtcgactgccagaggttccttctcctcctcctcctcccgtttccgcttcagacccttgctcagcatcttgctcactagcggccaatcagaacgaagaggtagccacccacaaccaatcaggaaacggcggcggcagcatcgcttgttggctgtcctccggaaacccgcgcctgggtcgcgcccacgcgtccg

SEQ ID NO: 327 - DNA, 1842 bp, Homo sapiens
aagtacaaaataatattttaataacataggaacatgaacatgaaaacaatgtaaacaggttagaatttttggatatgatacctaccaaacgtgatttggaaccgtaccgcaactgggtaaaatttctatggcaaaaggattaaccaaggcatatcataggaaatccactttgcccaatataagcagttctcagcacatactcaaatgcacacaaacatgaaaatcggaaataaaggaatgttaaaaaaataacttaggcagacacaaataaaaccaccccactagtgtatgaatgatgccacgtttcttatgatcttaattacatttaaggatttaaaaaatgccactgatctcacagtttacaatatccaaatcttcaaacctgctggaagaagtcccacagcacagcctggaaattcgcatccgttgcattctctcgtgcagttacctgcttatgggctgtaccttctgccttgatatgtagtcagttcttcctgaaggatggaagctctcttttgcagaaaattaacctgtgattttagggaggaaatggtgtcttcaagttcttgtcttagggatgctggcatcaatcctttcaattttgtttcatattcttgtcgtatgtaagttatctgttcctgtgactccaattctttgtgttgtaattttttctctgcacatcgcacctgattagaacggttttctaattcatcttgtaaaaccttgattgcttggtcattatctctaatcagctgcttcttctcatcttcaaacttttgtctaacatcctggagccgcctttctgcagcaagctgctgctggctgttctcttctttcagagaggaaatggttgtctgaagttctgctatgatctgtgaagatttggcaagcttctgagtgtattccttctcaatctgcttcagcttgctgttggccttttccagtgtcatctctgtctcagcagcatgagtctttttcagctctattttcatcttttctgattcagccttcagtttattgacgacaatctcatgttcccttgtagccctttgcttttcctcttcacgaagaagaccaagctctaccagctgctgtttccgctgtgagttcacattgatcaattcttctctcaacttgtgaacctgggcctccatgtcggcaataacctgtgcatctcgtttcttgaactcctgaatttgattttcgtgctccatattggcagcgcgaagctgtttttccaggttttcaatttcccgttcatggtctcggactaggctatccttctctgcgttatgctgctgtaataggtgcgtcttctcctgttcatgctccagcttcagctctactatctgttgttcataccgctgtctgatgtcctccagttgccataaaaactcctttgattgtttctcacgaagagatttggatctagttagatctgcctccactttttccatttcaaagcttcctcaaatttatgaattttcttttgagtatcttcttttcctttatcaagttcactctgcaagtcatgagcctttttttcatagatgtgttttagatgacttttctccatctgaaacttattttcttgatcccttagttgttgctttctttgaagttctgattcctgtaactgctgttttaattgacagacattctgctctaattcttcaatcatactagatgccttagaagctgaaagagcatgttcttgttttagaaggtttatatcagcatcatatttggtttgtaacagtttcatgttttgctcataatcatttacaagatggtccttctctttatgcagtgtgttacgccttgcctttacttcttgtaatt

SEQ ID NO: 328 - DNA, 1293 bp, Homo sapiens
  misc_feature (1)...(1293): n = a,t,c or g
ttttttttttttgacgcggggagagatttaatttacatagcagccacttggggtccagtcagagctggggcagtgggggaatctataaccccagagggtaccccccagacccccacccccgggagaccagtcctcaccaacccttggatgggctcccaaggttgtgcagaagatgctccagtcaaaaggatagagacatttgggaaataaaggctgtccccaaagttggggggaangtccacggcctgggagtggatagcctacatggtggccccagggggtctgagagaccagtcccatgtccctgggcgagtccttcagcctgggtggccctagaggaaagccttcgcgggcggaaactgttccctggaggagggcgcggtactggtcaaaatccttcctttccacacgggtgacgccgccttccttagcatacccacaacttcccggcacaccagccttgataaagcgcttcattcgtgggacaccagaatcacaccaacccctgaaattgtttgaaggcaaggccccagagcctcaatggctctcccatgtccaaggtgggtttgtgggttcatcccagaatgtagaaagttggggcagggcaatagtccatctgagcaaaaggccacttcggcttctttctggcccccaagacaggctggcaaagaggacgcatggcccagttctccggagatgcccataccgaacccaagctggtgacnggtactcctcctcaggccgccccaggaaaacttgcgtgcccagcaagttcccacaagcactgaacgtttaggtcccagctgctcccacatggtgctggctgaaatagccaatcttcagattcctgtgagcgtgtctgatgccccgaacaggtgccaggtcccccaaaagcagcttcagcatggtagacttcccagccccattctctccaaccacacagatgcgagactcgagatcagcagacacagagaggcgactgaagatgacgtgcttcggatcgtagtagaaatccacctcatctagctgcagaattggcggcgagaacttctcaaacccatcagggaacttcattacgacctctgattccttgtccacaggcttcagctcaggcctgggagaagagatgaggtagactagatttattacttaaaaaaataacttcctacacgagtaatatatgttcagagaaaacttagaaagggcttgtactcctaccactcaggtatcattactttagagtccattcttctcatttactgtatgctaaaaaatagaattaggctttttgtg

SEQ ID NO: 329 - DNA, 1734 bp, Homo sapiens
aaatttgtatttcgataaccattagtgcagtgcggtggaagtcaagatggcggcgcggacagcgttcggtgctgtgtgccggcgcctctggcagggattggggaatttttctgtaaacacttctaagggcaatacagccaaaaatggtggcttgcttctcagtaccaatatgaagtgggtacagttttcaaacctacacgttgatgttccaaaggatttgaccaaacctgtggtaacaatctctgatgaaccagacatattatataagcgcctctcggttttggtgaaaggtcacgataaggctgtattggacagttatgaatattttgctgtgcttgctgctaaagaacttggtatctctattaaagtacatgaacctccaaggaaaatagagcgatttactcttctccaatcagtgcatatttacaagaagcacagagttcagtatgaaatgagaacactttacagatgtttagagttagaacatctaactggaagcacagcagatgtctacttggaatatattcagcgaaacttacctgaaggggttgccatggaagtaacaaagttttgtttctttatttttttagacacaattagaacagttaccagaacacatcaaggagccaatctgggaaacactatcagaagaaaaagaagaaagcaagtcataaagcctcagggaggccatttttgcctaaatttgaaatgagggtgggccagatgagtatgtttaagtggagagtgcttccagctgagatgatttgagtctgtcctaactgctccattgagttctcgtgccctcatcagctgagggcagggaatggaactttaatggaagaaccacttttatctattctttttattcattgtttcagttctgatttcagcaaacatgagcaaaccactttgactgaaagcagaaagagtgaaaattctattttgttacgctactggtgttcaattattagtttgtaccatttttaatttatgtcagttgatgcatctgaaaataagtgcttggagtgttcgtacccttatttttttttaagattcctagaaggaatctttggttaattcagattgagcagttaaagtttttgctatttacctttgtgcaggctggcatatgctaatttgggggtggtaaccaaccgattttatctcatgtaagcattacattttgaagactgaatatacttcacagcagatcaaacacatttatggcatgcactgacctcttcttggagcccagaactttatagagttgcctaccagggttactgtaatggaatttatgatcttaagaaattactagttgtattatttatcctatgattcattcattcaataagcttttactgcataaactttacatccagcactgtagttaagtacccaaaattgaatagaaataatggcttttgaaaattgcacaaagcaggccaggcacggtggctcacgcctgtaatcccagcactttgggaggccgaggcaggcggatcacgaggtcaagagatccagaccatcctggctaacacggtgaaaccccgtctctaataaaaatacaaaaattagctggacatggtggcacgtgcctgtaatcccagctactcaggaggctgaggcaggagaatcgcgtgaacccgggcccggtggaggctgcagtgagacgagatcgcgccactgcactccagcctggcgacagagcgagacaccgtctcaaaaaaaaaa

SEQ ID NO: 330 - DNA, 2105 bp, Homo sapiens
ttttttttttttatgtcattcagcctttactgtaaaaaaggaaacaataaaaacaaaaccctattaataaacacaatgcaaacaatgcccgagattatcataaaaacatactagcaagccacaagtaccagagaggggtgaacaggcatatctgctagctctcctcttgcagtcctcagcctcccacaggaggcacaaggtccaaactattcctcaaaaaaaaggacagcctctttatgctgaaataggaactttaaaggaagctcttcttgtagtccaaatggacgtaccttgtggtatggctgtaaggactcgattttacggcttgtgtattcctaactatagctaggcctgtcacctgctgttcctgtgatctcagctttacctagaagagctcctgaaacagaatgggtacacgaaaatctggaatgaatagctatctgctcaaaaacgattgtttaaaaacagatgattggggccgggcgcggtggctcatgcctgtaatcccagcactttgggaggccgaggcgggcggatcacgaggtgaggagatcgagaccatcctgggcaacatggtgaaaccccgtctctactaaaaatacaaaaattagctgggcgtggtgatgccagccactcgggaggctgaggcaggagaatcgtttgaaccagggagtcagaggttgcagcgagccgagactgcgccactgcactccagcctggcgacagagcgagactccgtctcagaacgaacaaagaaacaaacaaaccagatgactgggagactgaagaggaaaaaagatgggagaaaacgtagggaaaggatggggcctcacagactcagctgtgggtgggggggtaaatcattacctcaggagaagcccaaggaattgtccccgaggtgagctttggaaagaaaacaaaaacaaaaacaaaaacaccaaaaaacacctaaatttcctgtattaaagtgacacataatcatgttttctgattctcttcactgtctgcctgcggggagggggtggggaaggtgttaatgatgctgatccctacttctgcttcaaggagatctggtggggaattcttccaccagtccagagtttgctggtgctgacctcatccctgtatcacgggcctagaatgtgggaggctaataggatgggtgggttgcaggaggtagaagaggggatggcctagagagtttctccattcagagctggagagttgttgaagggaagggtattttaaaagggctccacccacccctagccccagcccctcagctgtggggagaggccacctcctctgatggggtctcgatgctgctgctctgttcctggtctggcacgtcctcctcttcctgctccaagctgaagttctcgagctcctgaaaaatctcatccatgaagtcctgggagttctgtttgtaagacacagctaatcgaattgcatcattgaagagcttcacaacattggtaccatcagcagccgagacgaaatacaggggcagggagaacttcttggcaaaattgaagcttttttgggtcacgtttatgtctgctgtagagagaaggtaggacattggtctgtctgtcaagggaagggaagaaggtttggaggggggggccactggaggccttcattccagaaagtgggataggcagggatgattgggaaacaggtcctagaaagagctcagttaatagggatctgtgtcttggaaagagggcaggtcggcttagctggcttctttataaggtgggaagaatgcaagcaaccaaccaagggttgtatcttatcgtgggagggaggaccaatcactgaaggttgcctgcccggggaatggaggaggaaatgtatgagggcaggtccccagtgaattgctaacacccaggtgcagggatggccccaccatcaattttattggccaccacgatgcatgggatctctggcctgaactcccgaagctctgtataccaggtgctcaggttcctatgggtgactttcctctggacatcaaacaccatgatgcaagcgtgggtcttgtggtagtaggaggcatgcatgctctggaaccgttcctggcctgccgtgtcccaaaagtc

SEQ ID NO: 331 - DNA, 5654 bp, Homo sapiens
ggagcgacgccgctcgggtcagtcggcggccggactgggaagatggacgcagctactctgacctacgacactctccggtttgctgagtttgaagattttcctgagacctcagagcccgtttggatactgggtagaaaatacagcattttcacagaaaaggacgagatcttgtctgatgtggcatctagactttggtttacatacaggaaaaactttccagccattggggggacaggccccacctcggacacaggctggggctgcatgctgcggtgtggacagatgatctttgcccaagccctggtgtgccggcacctaggccgagattggaggtggacacaaaggaagaggcagccagacagctacttcagcgtcctcaacgcattcatcgacaggaaggacagttactactccattcaccagatagcgcaaatgggagttggcgaaggcaagtccataggccagtggtacgggcccaacactgtcgcccaggtcctgaagaagcttgctgtcttcgatacgtggagctccttggcggtccacattgcaatggacaacactgttgtgatggaggaaatcagaaggttgtgcaggaccagcgttccctgtgcaggcgccactgcgtttcctgcagattccgaccggcactgcaacggattccctgccggagctgaggtcaccaacaggccgtcgccatggagacccctggtacttctcattcccctgcgcctggggctcacggacatcaacgaggcctacgtggagacgctgaagcactgcttcatggatgccccagtccctgggcgtcatcggagggaagcccaacagcgcccacttatttcatcggctaagttgggtgaggagctcatctacctggacccccacaccacgcagccagccgtggagcccactgatggctgcttcatcccggacgagagcttccactgccagcacccgccgtgccgcatgagcatcgcggagcttgacccgtccatcgctgtggtacgtggcggccacctgagcacacaggcatttggtgctgaatgctgtttgggaatgacgaggaaaactttcggatttttgcgtttttttttcagcatgttgggataagtactgtgttcacgtggttgggaatctgaagggtataagagccggaactgtgtccttgcaccctcacgtccctcccccaggcaccacctcctgtgcagccttcatggccttcgagtggcccagagagcgtgtgtctggatgtgagcgtgtgtgggcgcgtgctgagtgtgcatggatgagtgtgagccatggtgagtgtgtccccctcacacctacatttaaacacacgggcggcccctccacccacccctgcaccaccttcgtcacacccacatttaaacacgggcggcccctccacccacccactcctgcaccaccttttgttttccggaggctctgacttgacctctctgggggatttcctaagaaggagcttccctgtttttccattttgattacctagttgtgatttttggtgtgtgatttatgcagacctgcctgccctcaaatatatttgatggggaaagaggccaaaaaacccccctagaaatcatgaatgacggtgacatgctcagggaagcagttaaccgaatcgggggctctgttgtggatgctccgccccatttaggaggaagaaggcagatctgggcctgaaatgggacggtctctgagctgtggcgcagccccagagtgcacaccacgctccatgcacctcctgggcagggtggcagtagtggggaacatgggctggagctctgtggctcacactttttgtttgtttgtttgtttttgagacggagtctcactctgtcgcccaggctggagtgcagtggcgcgatctcggctcactgcaagctccgcctcccaggttcacgccattctcctgcctcagcctctggattagctgggactacaggcacccgccaccacgcctggctaattttctgtatttttaatagagacgggttttcactgtgttagccaggatggtcttgatctcctgacctcatgatccacccacctcggcctcccaaagtgctgggattacaggcgtgagccactgcgcgcagcctggcgcacacttcttaccagaacctagtcacgaattcctcgtcgaactagaattaggtatgtttgttactgtaaacgcagcttggtggcttacagtgattggcactctaacagtcaggtcaggctagagagccagccaccgcagacagaggagtggacgcgtgaacgttgagttgagaccaaaggggccacctggtgggataactgtcctcacccgtgaggaggaggaatgtcccctgtccccgggggagagtgctcctacaccagcgccgaggcggcagaatggtgtcttcaggggaagagagtgcccagtttgagcttctccccccatttcgtttctttttgtgttaacatctgcgcatctggcagcgttgagaattcctagtgactgtcattacaggcggcagctttaaggatgtgattgccggtgacccttggccggtcccctgtctcctggctcctcagcaggaggctccctgtgtcacggtgtccttgggcagttctcggtggcctttgccgccaagcttccagggagctgctgggcgaaggctgagacccagcggccctgtctcacagtcacagagagaagagctccccacttggccctaactcataacctgccccaatcccggaacactcggtgaggtttgagagatgcacaccacgtaacatctcgtgggcgaatcaaggcacagcaacgcagtggagcctgaggggagccgggcactggtgcaggggaccatgcacagggcaccctcggagctccattcccggccacaggagccaaggcaggctggaatgtccagcacctgcatgctgggggcctctgctgcgccactggcagtgggaatggaagcccccacctcttatccgactgcagatgggggtgtcgtgttctgctcatcgtcatttcgttttaggggtttttctgtaagactgaagatgacttcagtgattggtgccagcaagtcaaaaagctgtctctgcttggaggtgccctgcccatgtttgagctggtggagcagcagccttcacatctggcctgccccgacgtcctgaacctgtccctaggtgagagctgccaagtccaggtggggtccctcggaggtacgatctgtgcccttgcttccccagtcctggcccccttggttttgaccattaaggtgtgtgtgagcctgagccgtgagcacttggcagtggttcgcctgtgagaccaggtatggagtggagcgtcccctcctccaagcttgcgcccagcagcccaggacccacctcgtcttccccaccagcgctgcctgccggggcgctgtggagctgggcgtgctaccatggagtcctcaggggtctggagcagacagaacatgcaggctctgtggtgacgcagtcctgggtgggggactggttcacttgggcaccactggccatgggtggcgtagacccctcggaccatggccagcgtgccgcaggagccggcctgggctcgtgcagtgaagtgagtggccgtgagcgcgtcctcctcatctctgtctccctgtgggaaactctacaaacaaggcaatggcaatggaaccactcctgatgaccacgagggtcagacgcgggacagaggcccctcaggcctgagattgtgccggccgccccctgccctcctcaccctgccctgctcctcttctctgctccctccccccatattcgcaggtctgcacaacccccggacctgttcacacccgcatggggacagctgtctgtgggctgcagagcaggcactgctcagtctgccccacgccaagggcccttgactcacacccaggtggcccacccaagatgcctgatgcgctatgtcctgttccttctagattcttctgatgtagagcgactggaaagattcttcgactcagaagatgaagactttgaaatcctgtccctttgaaaatcctggggtcgggggtggcacctgtgagagcctggggctcctggtgccgctgcgtttcatccatcccgcccgctcgcctgccgagggctgcgccccgtgctgcctccccccagagggccacccgctgtgctcgtggactgaggctgcgctgcccgggaggccttactgcttggtgtcagactgcccagctcagagtgcccgtcagggcctgtgcatccgcacgcggagccgtctgttaggagcttccagagcgttctctcgacactgccagccccgtgttagcacctgggcctcagtcccacttgctcccaggcgccggttctgtggttggtttggaattaaagtcctgtttgaagttgtcagacacagacatgaatttctggggcgctccctgagtcagtctcagaagacctgtgcaggctggcgtgagaggagcggcagccacactgcggccccacgcccaaggactgggctgctctcgaggggggcgcgcccaccgctgtgtcctctctgcccagcctggcttaccaagggctacctcagtgggagatgaggttggaggaacgaaggcgaggttcctccttgctttggggagaaaagtattcaggaagtgggtgtgtgggaaacctgaagatggcgtgcacaggacacagcgtggtcggcctgggcagaagggcggctggctgtcctggagctgctgctggagcctgccctcagagtgtccctttccagtgctgtggcattctgtggcagcttccccaggtgtggtgacggggggggggcggggcctccacctgtgacagccaggcttgagggtggacggcgtgcctctcccaggagccttccccatgtccttgccttgctgagaattgccctcccatgccgctgaggtgttaggtggtttagggccaaaaggggaaaaccacttgagtcttgtggtgtgtggtgggcagacaccacagggtggcatcacctggtggcatttccagaacctcagccccgattccagcacccaccaccgcctgaccctgtgtaacctgctgtcccgggtcccagagtgcactctgccccactgctctgctgcctgtcctgggaaagtagctttgccccactaggaaatgtaaacaggagggcttggggagcgtgggcacttttctcatgagcagctactgcggcgttggcaggactcgctgctgctgctgctgctgcttgtgtaggtcggggagccggagatccccgaggacgcgcgccggacagtcggcactgaccggcccacctggtagcagaggacacccccagccccccaagcattgaagacatagtgtatttcctcgtatcctttctcccttgggtgtagttggggtggggaagcagggaaggctggtgcgatctccattccttgggctccgcgtccgagttcatggtgcgccgctgtgctgggagctgcagtgggaatgtgtgggacaccttgaccaaaggggagctttgtctcgtgtgttttgaaaaaggcttaatgaagagaatgttgttcattcttagtagtatagtttgcaattcttaatggcaaataataagtttcagtagaaacccaaaaaaaaaa

SEQ ID NO: 332 - DNA, 283 bp, Homo sapiens
ggagccaccgcgccccccgccaaatttagactttttgagctctgtgcgttgtgcctttcaacacttttcacaatggattttctgcttcttgataaggaaggcacccttgatcctgtcatggattcatttagcacacattggaccacgataggccctgctgacatgtttttttcattgtagacagcattataagaactttaaatctcacggcacaaacccctcgaagtctgtctgggcacatgccacatgccaatcttgtgcctttcccaaccttcttggttgg

SEQ ID NO: 333 - DNA, 1759 bp, Homo sapiens
gacccgccttgcggaattcggcacgagggacccctgtgcccaggctccgtgcgagcagcagtgtgagcccggtgggccacaaggctacagctgccactgtcgcctgggtttccggccagcggaggatgatccgcaccgctgtgtggacacagatgagtgccagattgccggtgtgtgccagcagatgtgtgtcaactacgttggtggcttcgagtgttattgtagcgagggacatgagctggaggctgatggcatcagctgcagccctgcaggggccatgggtgcccaggcttcccaggacctcggagatgagttgctggatgacggggaggatgaggaagatgaagacgaggcctggaaggccttcaacggtggctggacggagatgcctgggatcctgtggatggagcctacgcagccgcctgactttgccctggcctatagaccgagcttcccagaggacagagagccacagataccctacccggagcccacctggccacccccgctcagtgcccccagggtcccctaccactcctcagtgctctccgtcacccggcctgtggtggtctctgccacgcatcccacactgccttctgcccaccagcctcctgtgatccctgccacacacccagctttgtcccgtgaccaccagatccccgtgatcgcagccaactatccagatctgccttctgcctaccaacccggtattctctctgtctctcattcagcacagcctcctgcccaccagccccctatgatctcaaccaaatatccggagctcttccctgcccaccagtcccccatgtttccagacacccgggtcgctggcacccagaccaccactcatttgcctggaatcccacctaaccatgcccctctggtcaccaccctcggtgcccagctaccccctcaagccccagatgcccttgtcctcagaacccaggccacccagcttcccattatcccaactgcccagccctctctgaccaccacctccaggtcccctgtgtctcctgcccatcaaatctctgtgcctgctgccacccagcccgcagccctccccaccctcctgccctctcagagccccactaaccagacctcacccatcagccctacacatccccattccaaagccccccaaatcccaagggaagatggccccagtcccaagttggccctgtggctgccctcaccagctcccacagcagccccaacagccctgggggaggctggtcttgccgagcacagccagagggatgaccggtggctgctggtggcactcctggtgccaacgtgtgtctttttggtggtcctgcttgcactgggcatcgtgtactgcacccgctgtggcccccatgcacccaacaagcgcatcactgactgctatcgctgggtcatccatgctgggagcaagagcccaacagaacccatgccccccaggggcagcctcacaggggtgcagacctgcagaaccagcgtgtgatggggtgcagacccccctcatggagtatggggcgctggacacatggccggggctgcaccagggacccatgggggctgcccagctggacagatggcttcctgctccccaggcccagccagggtcctctctcaaccactagacttggctctcaggaactctgcttcctggcccagcgctcgtgaccaaggatacaccaaagcccttaagacctcagggggcgggtgctggggtcttctccaataaatggggtgtcaaccttacccaaaaaaaaaa

SEQ ID NO: 334 - DNA, 2852 bp, Homo sapiens
ctacgagtacgtcggcgcccgcacctccccgcaccgcccgcgctgcgcgcccggaggagcgaccgccgcagttctcgagctccagctgcattccctccgcgtccgccccacgcttctcccgctccgggccccgcaatggcccaggcagtgtggtcgcgcctcggccgcatcctctggcttgcctgcctcctgccctgggccccggcaggggtggccgcaggcctgtatgaactcaatctcaccaccgatagccctgccaccacgggagcggtggtgaccatctcggccagcctggtggccaaggacaacggcagcctggccctgcccgctgacgcccacctctaccgcttccactggatccacaccccgctggtgcttactggcaagatggagaagggtctcagctccaccatccgtgttgtcggccacgtgcccggggaattcccggtctctgtctgggtcactgccgctgactgctggatgtgccagcctgtggccaggggctttgtggtcctccccatcacagagttcctcgtgggggaccttgttgtcacccagaacacttccctaccctggcccagctcctatctcactaagaccgtcctgaaagtctccttcctcctccacgacccgagcaacttcctcaagaccgccttgtttctctacagctgggacttcggggacgggacccagatggtgactgaagactccgtggtctattataactattccatcatcgggaccttcaccgtgaagctcaaagtggtggcggagtgggaagaggtggagccggatgccacgagggctgtgaagcagaagaccggggacttctccgcctcgctgaagctgcaggaaacccttcgaggcatccaagtgttggggcccaccctaattcagaccttccaaaagatgaccgtgaccttgaacttcctggggagccctcctctgactgtgtgctggcgtctcaagcctgagtgcctcccgctggaggaaggggagtgccaccctgtgtccgtggccagcacagcgtacaacctgacccacaccttcagggaccctggggactactgcttcagcatccgggccgagaatatcatcagcaagacacatcagtaccacaagatccaggtgtggccctccagaatccagccggctgtctttgctttcccatgtgctacacttatcactgtgatgttggccttcatcatgtacatgaccctgcggaatgccactcagcaaaaggacatggtggagaacccggagccaccctctggggtcaggtgctgctgccagatgtgctgtgggcctttcttgctggagactccatctgagtacctggaaattgttcgtgagaaccacgggctgctcccgcccctctataagtctgtcaaaacttacaccgtgtgagcactccccctccccaccccatctcagtgttaactgactgctgacttggagtttccagcagggtggtgtgcaccactgaccaggaggggttcatttgcgtggggctgttggcctggatcatccatccatctgtacagttcagccactgccacaagcccctccctctctgtcacccctgaccccagccattcacccatctgtacagtccagccactgacataagccccactcggttaccacccccttgaccccctacctttgaagaggcttcgtgcaggactttgatgcttggggtgttccgtgttgactcccaggtgggcctggctgcccactgcccattcctctcatattggcacatctgctgtccattgggggttctcagtttcctcccccagacagccctacctgtgccagagagctagaaagaaggtcataaagggttaaaaatccataactaaaggttgtacacatagatgggcacactcacagagagaagtgtgcatgtacacacaccacacacacacacacacacacacacagagaaatataaacacatgcgtcacatgggcatttcagatgatcagctctgtatctggttaagtcggttgctgggatgcaccctgcactagagctgaaaggaaatttgacctccaagcagccctgacaggttctgggcccgggccctccctttgtgctttgtctctgcagttcttgcgccctttataaggccatcctagtccctgctggctggcagggggctggatggggggcaggactaatactgagtgattgcagagtgctttataaatatcaccttattttatcgaaacccatctgtgaaactttcactgaggaaaaggccttgcagcggtagaagaggttgagtcaaggccgggcgcggtggctcacgcctgtaatcccagcactttgggaggccgaggcgggtggatcacgagatcaggagatcgagaccaccctggctaacacggtgaaaccccgtctctactaaaaaaatacaaaaagttagccgggcgtggtggtgggtgcctgtagtcccagctactcgggaggctgaggcaggagaatggtgcgaacccgggaggcggagcttgcagtgagcccagatggcgccactgcactccagcctgagtgacagagcgagactctgtctccaaaaaaaaaaaggccgggcgcggtggctcacgcttgtaatcccagcactttgggaggccgaggcgggcggatcacgaggtcaggagatcgagaccatcctggctaacacggtgaaaccccgtctctactaaaaatacaaaaaaaattagccgggcgtgatggtgggcgcctgtagtcccatctactcgggaggctgaggcaggagaatggcgtgaacccgggaggtggaggttgcagtgagccgagattgcgccactgcactcccgcctggg

SEQ ID NO: 335 - DNA, 865 bp, Homo sapiens
gtcgtggaattcgccttccagctgtcttctgtgagtgtctgcctgacagtttcctttggctggcagctaggcactgtgtcttcctgtctctctagggactggttcttgaagggaaacctcctcatcatcatcgtcagtgtgttaatcatcctgcccctcgccctcatgaaacacttgggctacctggggtacaccagtggtctctctctgacctgcatgctgtttttccttgtttcggtcatctacaagaagttccaacttggctgtgctataggccacaatgaaacagcaatggagagtgaagctctcgtgggactccccagccaaggactcaacagcagctgtgaggcccagatgttcacagttgactcacagatgtcctacacagtgcccattatggcttttgcttttgtctgccaccctgaggtgctgcccatctatacggagctctgccggccctccaagcgcaggatgcaggccgtggccaacgtgtccattggggccatgttctgcatgtatgggctcacagcaacctttggatacctcaccttctacagcagtgtgaaggcggagatgctgcacatgtacagccagaaggacccgctcatcctctgtgtgcgcctggccgtgctgctcgcgggtgaccctcactgtgccagtcgtgctgttccctatccgccgggccctgcagcagctgcttttcccaggcaaggccttcagctggccacgacatgtggccatagctctgatcctgcttgttttggtcaatgtccttgtcatctgtgtgccaaccatccgggatatctttggagttatcgggtccacctcagcccccagcctcatcttcatcctccccagctgtatt

SEQ ID NO: 336 - DNA, 1126 bp, Homo sapiens
gtggcgccgggagcaaaagcagcatgatgcagctcatgcacctggagtccttttatgaaaaaacctcctcctgggcttatcaaggaagatgacactaagccagaagactgcataccagatgtaccaggcaatgaacatgccagggaatttctggctcacacaccaactaaaggactttggatgccactggagaaagaagtcaaagttaagcacttacttttcattggattgcttcataatttcttggtgatggaaaattcattcctaaagcaacaagattaaaggatgtttgggtaagcaattagtttacctgtcttttctgggaccttacacggttcatccatgattgcattttcttttagaattggagtttaatgaataaaaactttaatataatctactgattctttatctcactaaggtgaaacactcttatcttacagaaatatttccccttttctttgcttttaggttggcattgcaaatggtacggtcaccgaacaggctacaaagaatgccctttctttatcaaagacaaccaaaagttacaacagttcagagtagcacatgaggatttcatgtatgacatcatacgagacaataaacaacatgaaaagaatgtaaggatacagcagttaaaacagttactggaggattctacctcaggtgaagataggagcagctccagttcctctgaaggtaaagagaaacacaagaaaaagaagaagaaagaaaagcataagaaaaggaagaaagaaaagaaaaagaagaaaaaacggaagcacaaatcttccaagtcaaatgagggttctgactcagagtgacaaggatgtgacttgttcaacattctcttctcaaacactgaccaaggaacagaggaagatgcagtcagagaaagcagcaggatagagacgccgagagaggagtatatgtgggtcacagcagtgagctcccacccgccttgcagtgaagatgtgaccccaggagagggagtgtctccttccaggtgctagctctggacagcagctgattttaggcaggaaagtttcttcatcgttgtcctccctgctggtcacatgagtttacgattcctttgaagtgtctcccacagggtggcaggactggg

SEQ ID NO: 337 - DNA, 4280 bp, Homo sapiens
  misc_feature (1)...(4280): n = a,t,c or g
aagaaattgcaggtgctgcagcagagaacatgttaggcagtttgctgtgcctcccaggttcagggtcagtgcttcttgacccctgcactggttctaccatatcagagacaacaagtgaagcttggagtgtagaggtattgccaagtgactcagaggccccagacctaaagcaggaggagcgtctgcaagaactggagagctgttctggactgggtagcacatctgatgatacggatgtcagggaggtcagttcccgccccagcacaccaggcctcagtgttgtgtccggcataagtgcaacctctgaggatattcccaataagattgaagacctgagatctgagtgcagctctgattttgggggtaaagattctgtcactagtccagacatggatgaaataactcacgattttctttatatacttcagccaaaacaacattttcaacacattgaagcagaagcagacatgagaatccagctgtcttctagtgcccaccagctgacctctcctccttctcagtcagagtctctgctggccatgtttgatccactgtcttcacatgaaggggcttctgctgtggtaaggccaaaggttcactatgctaggccatcgcatccaccaccagatcccccaatcctggaaggagctgtgggaggaaatgaggccaggttgccaaactttggttcccccatgttttaactcccagctgaaatggaggcattcaagcaaaggcattccttacccctgagagactagttcgaagcaggagctctgaatatagtatcttctgtccggagacccatgagtgaccccagctggaaccggcgtcccaggaaatgaagagcgagaactccctccagctgcagccattggtgctacttctttggtggctgcacctcattcatcatcttcatccccgagtaaggactcctcaagaggagagactgaagaacgcaaagatagcgatgatgagaaatcagacaggaacagaccttggtggagaaaacgttttgtttcagccatgcctaaagctcctataccatttagaaagaaagaaaaacaagaaaaagacaaagatgatctggggcctgacagattctcaacactcacagatgatcccagccctagactcagtgcacaagctcaggtggctgaggatattctggacaaatacaggaatgccattaaacggaccagccccagtgatggagcaatggcaaactatgaaagtacagaggttatgggtgatggtgaaagtgcacatgattctccccgtgacgaagcactgcagaacatctcggctgatgatctcccagactctgcaagccaagcagcccacccgcaggattcagctttctcttacagagatgcaaaaaagaaactgaggcttgctctttgctctgcggactctgttgccttcccagtgctgaccccattcaacaaggaatggtttaccagaccacacagacccagaagacaatgaaattgtatgcttcttaaaagttcaaatagctgaagcaattaatttacaagataagaatctaatggctcaacttcaagaaacaatgcgctgtgtgtgccgttttgataataggacttgtaggaaactgctggcttcgattgctgaggactacagaaaaagagccccatatattgcttatctcactcgttgtcgacaaggactacagaccacacaggctcacctggaaaggctattgcaaagagttttgcgggacaaagaagtggccaatcgatactttaccactgtctgtgtgagattactgcttgagagcaaagaaaagaagatcagggaattcattcaagactttcagaaactcaccgcagctgacgataaaactgctcaggtagaagattttctgcagtttctttatggtgcaatggcccaggatgtcatatggcaaaacgcgagtgaagaacagcttcaagatgcacagctggccattgagcgaagcgtgatgaaccggattttcaagctcgccttctaccctaatcaagatggggacatacttcgcgaccaggttcttcatgaacatatccagagattgtctaaagtagtgactgcaaatcacagagctcttcagataccagaggtttatcttcgagaagcaccatggccatctgcacaatcagaaatcaggacaataagtgcttataaaaccccccgggacaaagtgcagtgcatcctgagaatgtgctctacgattatgaacctcctgagcctggccaatgaggactctgtccctggagcggatgactttgttcctgtgttggtgtttgtgttgataaaggcaaatccaccctgtttgctgtctactgtgcagtatatcagtagcttttatgctagctgtctgtctggagaggagtcctattggtggatgcagttcacagcagcagtagaattcattaaaaccatcgatgaccgaaagtgaccaagaccaaggcccaccaaggcagcagactgttaatcagacaaacagatctctgagaaggtgcatcagctgctttgaaggctgaagattgttttgtatgatactgcacagcatcaggcattttaaagcagatctttactaaacaggttaatgagctaacaagcaggttctctcgtctttgggctctttcctttctgagttgcatattctattttcttgtccccaagtagagactagtactacaaaaagggaccacatttttcaagtatttctaagtataaaaaacaaaacaaaaatctcttaggaaatgtctagacctccattcttggattccctttctttccttttattttaaaaaagaacagtacccctcttttaagatgctgtcttacattaatgagcatctaatggaaagaaggtatgagttgcactgaggattagaatagtggtgcgttagtggcattatctataaatacactcacctaaattgaaagctaagaaggaaatgtaaatataatatatatttatatttgatgtaatatggacatctgcagattctaataaacaaggactattgctgatagtaggctgtgacatactgtcttgtgaaatggtttccttgacaaaatttaagctgagcttaaaagcaaaaaaacaaaaagtacacagaaatatttattaaaatgtaatacagtttattgaactttctaggtatggagtttgatggacagggctgcctttaatgagtgtgaaggtcactaagtcacttagacatctcaccgtggaagtttgtgagcctgcattaggagatagactgattaccatacatgacataaaaaggaacagtggatagctcatactttatggtggttcttctcctccgaaataatatactgcagaaatcccagacagagctccttacaaacctttaattgtaatatatttttgatgattattcacattgaatgcacagaccaagaattcagtgaatgtcattttttaaaaaactaatttgtattgtctgctctagtgatacaagttttactagtgataaactattttaatcaaccatactattcttatggaaaaaaatatctattttggcaggtttctgtgcctttatttccctcttctgaaaaaaagtctgtgttttcatagtttggtttgcattgtatatcaataattaatcaggaatgggttttggtgcctgaaaaattggccatggaggcacaccaaagcttcaagcacaagtcttgtacatgggccatcactgtctggtttcacttcgtgtgtttcctaaacacatttagctgcttttttaacaaactcagccccatacttgagtcccttgttgttgggagcatttccaggcatcttttaagggaactgtgacaaacagcctcgggcagatgaacacggaggctctctgttgtctgtctctgagatctttgtgtctgggaatgcctaaagattttatttttttttctttggttttattttattttattttatttttttgagacagagtctcaccctgttgcccaggctggagtgcaatggtgcgatcttggctcactgcaacctccacctcccagttcaagtgattcccctgcctcagcctcccgagtagctagggactacaggcgcatgtcacccaagcccggctaaatttttgtatttttagtaggaaacgggggttttcaccatgttgggccagggtggatcctcaatctcctgaacctcgtggatccacccgccttngggcttcccaaagtgccgggatttacaagcgtggaaccacctgncccagccagaaattaggattttt

SEQ ID NO: 338 - DNA, 1796 bp, Homo sapiens
tggccatctttactgtgggctgaagcctgtgcgcttactcgcgcatgtgcaagccttccctcgctttcctcttccaagtagccttgcctagagcggagcctcccgcgccatttctgtgcgcctgcgtagcgtgaccctgcgcagcctgggaggcgggtcttagctccaggtgcgtacggcatctgacttgacgtggcccacaactgaaaggtctggggagaaggcgccgtgtccgggtgtggagaggggcgtcgtggaagcgagaagagtggcccgtccctctcctccccctttccctctttcggaaagtggtttctgcggggcccgggagcctcggagtaccgaacctcgatctccggggcggggtccttggtggggactgagcgccccctcccggggacgggcggtctggccgcggagtcccctgcgggagcgtgattggctggaaacggtcccgaacccccaggggagcccgatccctgggggaccctggcttcggactccagtatctgtcgtcgcagggtccctgccctagtggcctatgtcccttgctcggggccatggagacactgcggccagtacggcggcgcctctgtctgaagaaggggaagtgacctccggcctccaggctctggccgtggaggataccggaggcccctctgcctcggccggtaaggccgaggacgagggggaaggaggccgagaggagaccgagcgtgaggggtccgggggcgaggaggcgcagggagaagtccccagcgctgggggagaagagcctgccgaggaggactccgaggactggtgcgtgccctgcagcgacgaggaggtggagctgcctgcggatgggcagccctggatgcccccgccctccgaaatccagcggctctatgaactgctggctgcccacggtactctggagctgcaagccgagatcctgccccgccggcctcccacgccggaggcccagagcgaagaggagagatccgatgaggagccggaggccaaagaagaggaagaggaaaaaccacacatgcccacggaatttgattttgatgatgagccagtgacaccaaaggactccctgattgaccggagacgcaccccaggaagctcagcccggagccagaaacgggaggcccgcctggacaaggtgctgtcggacatgaagagacacaagaagctggaggagcagatccttcgtaccgggagggacctcttcagcctggactcggaggaccccagccccgccagccccccactccgatcctccgggagtagtctcttccctcggcagcggaaatactgattcccactgctcctgcctctagggtgcagtgtccgtacctgctggagcctgggccctccttccccagcccagacattgagaaacttgggaagaagagagaaacctcaagctcccaaacagcacgttgcgggaaagaggaagagagagtgtgagtgtgtgtgtgtgttttttctattgaacacctgtagagtgtgtgtgtgtgttttctattgaacacctatagagagagtgtgtgtgttttctattgaacatctatatagagagagtgtgtgagtgtgtgttttctattgaacacctattcagagacctggactgaattttctgagtctgaaataaaagatgcagagctatcatctcttaaaaggaggggctgtagctgtagctcaacagttaggccccacttgaagggagaggcagaattgtactcacccagattggaaaatgaaagccagatgggtagaggtgccctcagttagcacctgtcccatct

SEQ ID NO: 339 - DNA, 1771 bp, Homo sapiens
cttgggccgagggacgtttgggcaagtggtttagtgctggaaacggggcaccaatgagatcgtagccatcaagatcctgaagaaccacccatcctatgcccgacaaggtcagattgaagtgagcatcctggcccggttgagcacggagagtgccgatgactataacttcgtccgggcctacgaatgcttccagcacaagaaccacacgtgcttggtcttcgagatgttggagcagaacctctatgactttctgaagcaaaacaagtttagccccttgcccctcaaatacattcgcccagttctccagcaggtagccacagccctgatgaaactcaaaagcctaggtcttatccacgctgacctcaaaccagaaaacatcatgctggtggatccatctagacaaccatacagagtcaaggtcatcgactttggttcagccagccacgtctccaaggctgtgtgctccacctacttgcagtccagatattacagggcccctgagatcatccttggtttaccattttgtgaggcaattgacatgtggtccctgggctgtgttattgcagaattgttcctgggttggccgttatatccaggagcttctgagtatgatcagattcgtatatttcacaaacacagggtttgcctgctgaatatttattaagcgccgggacaaagacaactaggtttttcaaccgtgacacggactcaccatatcctttgtggagactgaagacaccagatgaccatgaagcagagacagggattaagtcaaaagaagcaagaaagtacattttcaactgtttagatgatatggcccaggtgaacatgacgacagatttggaagggagcgacatgttggtagaaaaggctgtccggcgggagttcattgacctgttgaagaagatgctgtccattgattctgtcaagagattctctccagtcggatccctgaaccatccctttgtcaccatgtcactctttctcgattttccccacagcacacacgtcaaatcatgtttccagaacatggagatctgcaagcgtcgggtgaatatgtatgacacggtgaaccagagcaaaacccctttcatcacgcacgtggcccccagcacgtccaccaacctgaccatgacctttaacaaccagctgaccactgtccacaaccagccctcagcggcatccatggctgcagtggcccagcggagcatgcccctgcagacaggaacagcccagatttgtgcccggcctgacccgttccagcaagctctcatcgtgtgtccccccggcttccaaggcttgcaggcctctccctctaagcacgctggctactcggtgcgaatggaaaatgcagttcccatcgtcactcaagccccaggagctcagcctcttcagatccaaccaggtctgcttgcccagcaggcttggccaagtgggacccagcagatcctgcttcccccagcatggcagcaactgactggagtggccacccacacatcagtgcagcatgccgccgtgattcccgagaccatggcaggcacccagcagctggcggactggagaaatacgcatgctcacggaagccattataatcccatcatgcagcagcctgcactattgaccggtcatgtgacccttccagcagcacagcccttaaatgtgggtgtggcccacgtgatgcggcagcagccaaccagcaccacctcctcccggaagagtaagcagcacctgtattgcggccgcgctagagtatccaagattgcgtctcgct

SEQ ID NO: 340 - DNA, 2725 bp, Homo sapiens
ggaattcgctatatgccgctatcctctgggcatgtcaggaggccagattccagatgaggacatcacagcttccagtcagtggtcagagtccacagctgccaaatatggaaggctggactcagaagaaggggatggagcctggtgccctgagattccagtggaacctgatgacctgaaggagtttctgcagattgacttgcacaccctccattttatcactctggtggggacccaggggcgccatgcaggaggtcatggcatcgagtttgcccccatgtacaagatcaattacagtcgggatggcactcgctggatctcttggcggaaccgtcatgggaaacaggtgctggatggaaatagtaacccctatgacattttcctaaaggacttggagccgcccattgtagccagatttgtccggttcattccagtcaccgaccactccatgaatgtgtgtatgagagtggagctttacggctgtgtctggctagatggcttggtgtcttacaatgctccagctgggcagcagtttgtactccctggaggttccatcatttatctgaatgattctgtctatgatggagctgttggatacagcatgacagaagggctaggccaattgaccgatggtgtgtctggcctggacgatttcacccagacccatgaataccacgtgtggcccggctatgactatgtgggctggcggaacgagagtgccaccaatggctacattgagatcatgtttgaatttgaccgcatcaggaatttcactaccatgaaggtccactgcaacaacatgtttgctaaaggtgtgaagatctttaaggaggtacagtgctacttccgctctgaagccagtgagtgggaacctaatgccatttccttcccccttgtcctggatgacgtcaaccccagtgctcggtttgtcacggtgcctctccaccaccgaatggccagtgccatcaagtgtcaataccattttgcagatacctggatgatgttcagtgagatcaccttccaatcagatgctgcaatgtacaacaactctgaagccctgcccacctctcctatggcacccacaacctatgatccaatgcttaaagttgatgacagcaacactcggatcctgattggctgcttggtggccatcatctttatcctcctggccatcattgtcatcatcctctggaggcagttctggcagaaaatgctggagaaggcttctcggaggatgctggatgatgaaatgacagtcagcctttccctgccaagtgattctagcatgttcaacaataaccgctcctcatcacctagtgaacaagggtccaactcgacttacgatcgcatctttccccttcgccctgactaccaggagccatccaggctgatacgaaaactcccagaatttgctccaggggaggaggagtcaggctgcagcggtgttgtgaagccagtccagcccagtggccctgagggggtgccccactatgcagaggctgacatagtgaacctccaaggagtgacaggaggcaacacatactcagtgcctgccgtcaccatggacctgctctcagggaaaagatgtggctgtgggagggagtttcccccagggaaactcctaactttcaaagagaagctgggagaaggacagtttggggaggttcatctctgtgaagtggagggaatggaaaaattcaaagacaaagattttgccctagatgtcagtgccaaccagcctgtcctggtggctgtgaaaatgctccgagcagatgccaacaagaatgccaggaatgattttcttaaggagataaagatcatgtctcggctcaaggacccaaacatcatccatctattatctgtgtgtatcactgatgaccctctctgtatgatcactgaatacatggagaatggagatctcaatcagtttctttcccgccacgagccccctaattcttcctccagcgatgtacgcactgtcagttacaccaatctgaagtttatggctacccaaattgcctctggcatgaagtacctttcctctcttaattttgttcaccgagatctggccacacgaaactgtttagtgggtaagaactacacaatcaagatagctgactttggaatgagcaggaacctgtacagtggtgactattaccggatccagggccgggcagtgctccctatccgctggatgtcttgggagagtatcttgctgggcaagttcactacagcaagtgatgtgtgggcctttgggggttactttgtgggaaaactttcaccttttgtcaaagaaaaggcccctattccccagctgtccagatgaaacaggttattgaagaaatactggagagttcttcccgagacccaagggagggcagacttacctcccctcaaccagcccatttgtccctgactcctgtgtaataaagctgatgctcagctgctggagaagagatacgaagaaccgtccctcattccaagaaatccaccttctgctccttcaacaaggcgacgagcgatgctgtcagtgcctggccatgttcctacggctcaggtcctccctacaagacctaccactcacccatgcctatgccactccatctggacatttaatgaaactgagagacagaggcttgtttgctttgccctcttttcctggtcacccccactccctacccctgactcatatatacttttttttttttacattaaagaactaaaaaaa

SEQ ID NO: 341 - DNA, 916 bp, Homo sapiens
cgtccagggagcactgcccacaggccgagccggggcctcccgcaagaggaaggaggtgccctcaaggctacggacctggggtcccggtggtggacgccccatggggctcaggcctaaagaggccgagagggcctcggggacccagtgcatgccccacgctgagcagcacaggctgccccaccgtgggctccccgatctctctctggatcaccgagacctcgcagggagggtcatcaggggcgccaggcccagggccaccacagtggaaggtctccccttccccaggcacgtaatcttccaggtcagccagtgtcagcatgcggccgttgtgcgtgaggatcttggggtcacgatccccaaggctgtgtgtgtcctgggactcctccgtcacaaaggcgtctccgtcttccccctcttcctctcccgcctcctccatggtgccctcctcctccaggctgcccatgccagaagcagcccagtccacactgcctctggcatccacgcggaagacaaggggctctctgacgccgaccatggctgtgccctgggcccaggcctcctgggccagcagcttgttgttggagttgttggaattggggtcccctccgggggtcgcaccgggcagtgtgaagagatgccccgatgagctcctgggcacctctgtggtgggagacacaccctgcgggcccatcttcttcacccggacttcaatggtctcctccacctccacccacttgggctggggccccgagagtccgggcagagctggagagtgggcctcggcctccgtcacatacagtgtgggcaccacgggcttctggcctggttctgcctccggcctgcggggctggccagcacctggcaggtacagcaggtcgggggccagtaggcctggcctcagcgggctggcagagca

SEQ ID NO: 342 - DNA, 860 bp, Homo sapiens
caagatcccgacaggcttaatcgctcccttaaggaaaaagttattccttgcatccgcggtaaacttgggcccccccaaggatcctttaaacgggccgcccctttttttttttttcaatttcttcaacaggtcatgttcaatttcttcaaagttttaacataaaaataatgagagccaggagtggggccggggcctggggggacgaaggtggtatgtgaaacaaggttggcacacaggcctcaccctcctctgcctcagattcccaagtgggcaggtgggggtgaatggggctccgggtagcacctcagctcctctcagctcccctcagcctgttctccttccagacccagagagctgagaagagtagctgtgaggctcagggcagaggctctctgcctttcaggaacagcccttaaccctgctccccttgcttgggcctcaggaaggtgccgcgagctctcctgccgtccctgggccgccctggctctgctgtgtccagatggtcaggctactgccagctggggccttgctgctctgaagtcccaggaagccaggggtctgcaggagcctcttgcctccaggctggttggggaagacgtcctccaggaagtagtagatatggcccaccgcaatccccagcaggtccacgaggatggagttgcccagcagcagcgagaagcccatgagcgcccaaggcaggaacggtgcctggaacttccggaacacaaggtgcgggttgaagtagagttgaaaggggctgaggagctccagctgcaccgcggcggtggtgaggacacaggctgcggtgtaagcccgcgtcaccgccggcacctgcaggaactcggccgctagtccctgcc

SEQ ID NO: 343 - DNA, 3658 bp, Homo sapiens
  misc_feature (1)...(3658): n = a,t,c or g
tttttttttttttaagatagaaatctatgcactttaatgattgccagaattgcccagcatagcttcagtaaaatagagaattgtctagaaaatacaatctccaaaatgtgtgcaagtactgcaaaccggacagaccggggcagggcaaggcccttgaaaccaagtcctccttgagcacctttcccaggttagaaacccctcttcagcctgtgcttcgcacgtttccttcagcgtgccgcccattcagactgcgccaacttacgtccccagtgcccacgcctgngtggatcaagtgtccaacgggaaagtatgagttagggcaagcgctttttttttaagctgtaaacgcttcacatgactgggccccgtaaggaaattgtggggagcttaggatgagcctgggagctttttcagggacttggatgaggactctgtacacaaatgtgtactggcagagagtctgcaccagcatcattctctgttgccctcagcatgtccagcactctcgggatgtccagcacctcattgtgttccaggcaggcgatcatgatctccgacaaaatcaccacgccagtccttcctaccccagcactgcagtggaccaacaacggagggttggggctttggggatcacttgtgctatttgtatggcgtcgaacagactggatctcttcaagatatgataaaaatcccttgaggtcttctggacagccatgttcaggccagtctgtgtattggaggtgccagacggtcctctcttgcccggtaaggaggtgcttcatcttcaggcctgtggtggcatagcagccagagtctgtgcggaaccgggtcgtgatcttaaaccttccataggtgacagtgttgtgcctggaaccaagtcgtggccagtacctaaagctcttctcccttccaccctcctcttctgctgtcaccattgctataattgcaattccctgttcccataccatctgccaaaaatcttgacaggtattctgtaatggtccctgtgtggcaatataatcccattcgattccactgacagagaccttaatatgtgatgcgttgatgtaaccagtgttgttttctttagttgggaccaactccactctcacatcatcataaggaagaacatcttggaatcgatttctttctgcattttcagggagtcgtgctgttgagcactccccatcaactagccgtttcttaagaattctttcatattctgtgaataccattccttgttctaatcgttgttccagaattttacacctttcatcattcgttgctctggtagccacttcctttccttcatcaggcagaggcactcgagatagggagagtccatttagggcagccagtttaagaggaccaattttttttgcatctactcgagtctttttcattccccctagaggcgggagcccttccacgatgttcttcttcccagagagaaggtccgacaccggccttttcttcagagagtccctccgggctcggtagcggcctgacgtggtgaggtcggactccgacatggagggcatcagcagcccgtctctccagggccgctgggcctctgcggtcgtgcggacggggctgctgtccatcatcctcttctccgcgtctgggacgtgggccttgggctccaggatgtgcaggggcccggcgagcaggacgcgagggcagccaggtgggtcctgggccaggccgggccgaggctcgcgcgcacgtgcagggggcgcccgggccccgctctcctcctcgaagtcctcgtcctcctcctcctcgctgctgtggattagcatggtggcgtccgacagggacttcttatggccgtacctcaagccctccgcctcctccggcccttctcgctgtgtcctctcggtgaaaacgctggggctgggagcccaccgagacggctcgcggcgcccacctctgccgccgacgcggatagggtgcgctccttgagccgcaggccctccaggccgtggctgagcccggccacctcgatgctgttccgtttgtgcagctgcgcgtggcgcgcggcggtgaggggctcgctgacctcctgcagcgagtgcgccacgggcaggctgtcctcctggaacgtttgcaccgagtggtgcacgcgccgcgtgatgaggtcggggttgctgctgctgatgtaaaggtggcgggacaggtctggcgtgctgttggcgggcctggggggcgggtagggtgggggtggccggtacacctgcgtccgcatgatgttgggagacgggtagtcctgcgcctgcagctgcgcattggtcagctccggcacgctgaccgcgcccaccacgggccgccgctcggcagggtaggggtagggagacgggctgtggaagctgtagctcaggctgaacgggcagtgtgcggccgctggcgaggggagctgtgcgtgctcgcggatctcgggctggctgtagaccagcgccgcgggcctgctgtaggcgtacgagctgccgatgttgaggtttcgcagcgagtggctctgccgttccgcatgcaccaggcccctgttgagctgcttcatcacagtctcatagtctggggtggggcggtaggacgggggtatcacggcgctgtgccgatgggacgggaggtagtcaggcctcatgacgtcactcccggtgatgctagggttggacgacatcggcgagggctgcaagtagggctgaggattatttaaggagttggtgctgtgtgcactgtagacactggcatttacggatccgaccgttgaagtcaatctgggctctattcaagcttgtctgaaattgaccatagtatcccttcctggttgggcacaaagaggttatcttgggaagaagcatatggttctgtataatgtccattatagtgcaactggcggtgggggaggcatcacgtagggctggggtttaggcagagacatccttgaagaagacctcctcctgattgggttcactgtgacagtctgagtttgcaggttacactggtttagtctgtaaaacttgtgtcgcgcaacacagagtctccaaatgtattttgctgtttccatgtcttcagtttgaaattgaatggtctcctctttatttgccagctctaatgcaaaaaaggacttgttgtgggacatgttggcaatgtcatgccacctaaataccacaggatgccttccattcttgtgtttcacaaagataccttcaagacacgctccaatggatatgtcacttccttggctatccttagcagggtagctctcttctccatagccatccattctctctacctcctgcatgtacagcatttcagcatcaggagctgtgagccctctgtatttctgatgtagtaaggccactttttgggttgcttcttccaatactttttcatcttgtaaccatcccacaggaaacaaggcaaatttctgaagaaagtcctgggattcatactgatcaaagtcaccaaaaatcgcttgaacagctaagcctgctaggtgaattggctgttccaaggtacaagggataccttcttcccagatatccttcctcagttgcagataatactggtacccggtaatcctctgctggaagcgaggaacctgaggcgcttaaacccccattccaaaatagacggtaggttccaaggcgtttttttc

SEQ ID NO: 344 - DNA, 419 bp, Homo sapiens
aataaagaaagaaacagaagctggccgaggagtgagttgagctttccaagttagctgaccttaaagatgctgaagctgtccagaaattcttcctggaagagatatagctttggtgaagagatcctagctaaaggtgtagaccacctgacaaatccaagtgctgtgtgtggacagccacagtggttactgcaagtgttacaacaaactcttccactaccagtgatccagatgcttctgacaaagcccctaccagttaatcagagacttgtaagtgctggcgcttggccaaagacgatgtggaatgagaaacaaatgtcaacataataaaatctcagttaaaatacttgaaaaattcttaacttggtagttgagcagaagggcaaatatgcttgttatgaactattctacattgaaatcta

SEQ ID NO: 345 - DNA, 1253 bp, Homo sapiens
ggaattcctctgtcccgccatacacagggtgggacggggcagggcgggcattgagctttgtgtcctggggtcagggtgcttcccctgccggcctcaccccaccaagcggatctcatggtgctcctctggctgggcccacccgcagtggtatccttctgggggcccttatgggagcctgccgggggtgcagatcctgccgggggtgcagagcctgctgggggtgcagatgatttctgggtcccaggaccatgagggggctgctctacacacagccggaagatgctgcggacccaaactggccctttccctcccacaccaccccaggaccaatgggctggctggaggccacccatgctaaaataggctcaagggcctactttagcttctgggcaaaggtcttggcctgggcctgactctgtggccttcctgagctgcctccccagtaggcctcagtgctgggctacaggcctcctccattccctccattcatgtgaccccacccctcccagcagaaactctcttccgtagcccaggagcagctgttgagggtttcacctgcccatgccccagcctaaggccggcttccccagagcagacgggttgcactctcctgcccctcaggcccactctgtcatccaacaagctcactgcaactggcccatcttaaaaacaacaccggctggtcacgctggctcacacctgtaatcccagcgctgtgggaggccggggcggggggatcacttaaagtcaggagtttaagaccagcctgggcaacatggtgaaacccgagctccactaaaaacacaaaaacaaattaaggcaccctgagtggtggtgggtgcctgtggtcccagcgactcgggaggctgaggcagaattgcttgagcccaggaggtggaggctgcagtgagccacgatcgcatcacgcactccagcccgggcaacctggcaagaccctgactctaaaaagaaaaaaacaacaaaaaaaaaaagcccacgttcaagggcagcactattcaaaagagggaagcaactcaggaatccaaacgcgcaggagggaacacatcggggttcatccacaggggaacacgattcacccaaaaaaaggaaggaaaccggcccggccccgggacttgaatgcacctggaggagactgtgatgaacaaaagcacccaaacccaaaagggcagggacggggtgatctgactgaggtgaggaccccagccagccaaattcatggagacagaaagaag

SEQ ID NO: 346 - DNA, 807 bp, Homo sapiens
tttcgtcggaggcgggcgcgggcgcgtccctgtggccagtcacccggaggagttggtcgcacaattatgaaagactcggcttctgctgctagcgccggagctgagttagttctgagaaggtttccctgggcgttccttgtccggcggcctctgctgccgcctccggagacgcttcccgatagatggctacaggccgcggaggaggaggaggtggagttgctgcccttccggagtccgccccgtgaggagaatgtcccagaaatcctggatagaaagcactttgaccaagagggaatgtgtatatattataccaagttccaaggaccctcacagatgccttccaggatgtcaaatttgtcagcaactcgtcagacggggtttcactgtgttagccaggatggtctcgatctcctgacctcgtgatccacccgcctcggcttcccaaagtgctgggattacaggcgtgagccaccacgcccggccaatattttgtaatttttagtagagatggggtttcactatgttggccaggctagtcttaaactcctgtcctcgtgatcctcccacctcggcctcccaaagtgctgagattacaggtgtgagccactgcatccagccaataatatgctctttaacaaacaatggatcaaaggagaaatcacaagggaaatagaaaaatacttaaaaatgaatgaacatgaaagaaaacataccaaacgtatgggaaacagtgaaaacagtgcaaacgaggcaatttatagctatacaccattaaatttaaagataagaaagacgtcaaaccaacaa

SEQ ID NO: 347 - DNA, 918 bp, Homo sapiens
ttttttttttttagaatatatttcattttattataaagcagtgctcccaaacttttcacagcgtacacctcgagggtggagaactaacatccaagcacacctggatggtggatgggacccacttctgggtaacctgatgaggaagctctagtgaagaaattcaggacgcggtcttcagagcagagggcttggttcaagtccctgttctgccacttactaactgcatgaccttgagcaagccacttaatttctctgctccttctctgtgaaatgggtacaatgtggtcagcagtaaaggaactaatacatgtacagcactcagcacaaagcctggcacacagcaggctctcaccaggtgccattctcagcacaactgcttggttgagctactgtggcagtggcaggttgtgccccaagggggtgggctcaggagcccgtgcagcaagaggcagtgaccaaggaggcaggggacaatagccctatcttttcaggatctctgccttggacctggagaatggagagactttgctcctatcacgtcccaagttgggaaaactaaggacgaagccggtgactgacatctgaaatggaatcctctgcatctccaagtggccctatacctgacaatatcattactagtgaaaaccaagtgacaaacacactcctcgaccccaagttcttccacatgtcccattgaggagagcacagccaataacgcagagtgtatttatgcgcagggctggctaaacaggctggctacgagtccggaacagtgtcaggatctggcttcccattggccgacatgacagaatccttctcgcgttgctctctgatgtactggtccaacagggtggtcagctggaggggctggtgctggagcagggagtgggtctgggctgtgaggcaggtggagttctg

SEQ ID NO: 348 - DNA, 1893 bp, Homo sapiens
ctgaatccatggaaaaacgctttacaggacttctgcttaccttttctcagaatcaccagccttcttcagcaccacctttttggggaagatttacctagctgccaggaagaagaagaattttcagttcttgccagctgcctgggacttctgccaacgttttaccaaacagaacatccattcatcagtgcctcctgtctggattggccagttccagcatttgatattataactcattggtgttttgagataaaatcatttactgaaagacatgcagaacaaggaaaggccttgcttatccaagagtcaaaatggaaattaccacacctactacagttgcctgagaattataacaccatttttcagtactaccacagaaaaacctgtagtgtctgcaccaaggttcctaaagatcctgctgtttgccttgtgtgtggtacttttgtatgcctgaaaggactttgctgcaagcaacaaagttactgtgaatgtgtactgcactctcagaactgtggtgcaggaacaggtattttccttttgatcaatgcatcggtaattatcatcattcgaggtcaccgcttctgcctctggggttccgtgtatttggatgctcatggagaggaagaccgggatcttaggcgaggcaaacctctctacatttgtaaggaaagatacaaagttcttgagcaacagtggatttctcatacttttgatcacatcaataaaagatggggtccacattacaatgggctgtgactctccacctcagcattgcatcgtatcatcattttcgctacgaatttatttttcaacaataagctttaacttaatttgggggattaacacttttgctgagggagaaaaagaaaacatacattatgaagcctttccaaaattaggtgcttggtaatcacgttaatggtataattttttttttttaatatctggagaacattaataacaagttaaattattctttagtggtcattttttaagtgcacaattaataagaagcacaacttgttcacaaactcattcagaaatgattctcccaacaatgcatatcagctattcattgatacttagagtgggtgtgatttatttgacattttactgcttctttctgtctgtgtgttttaatttgcatctgccaagcataatgcatcttttttcctctgccattcttgtgttgattggagaatttttctgtatgtaattagaaaaaaatgtaaaacatgatttatgtgaaatactgtatagtaaaagttggtctaatagtagaactttaaaattttttcttattgtgaggaatctgttaaaagtttaaagctttgctgaaaactgaattcattctcaggaatttcataaatcttctccccaggtaaataattgaaatagctgtaaaataagtagatagctgctgttaatataatacagtacattttggggggcatatgtgtggttggggggtccttaaaaatcaaaatttgccatttcagttggatgaattactagaggtaataacaaatcttactataaaatcaagaggtttaagaacatacactgggcagatgttgattccgtgcatgcccaccttttattaccaaacaaggttttgtttatatgattgtattagaaatgctcagacttccccagaaatgaaccataaattttggaacttcctttcagctcaagaggttcagctatattgtatttgtgcagtggtaatcactacctatttctggctcgggtttccctaaaaggaaaaaaaaggcggcagtgggtgatgaccctcatggaatgagccacgcttcctgcattcctccttaggaactggctgtggaaaaccaatttatggtttgcaggggtttaaaaatccagtaaaaatgggggatg

SEQ ID NO: 349 - DNA, 1433 bp, Homo sapiens
gcaaggggcagttggtgaacttgctgcctccagagaattttccctggtgtggaggcagccagggacccaggatgctccggacctgttacgtgctctgttcccaagctggtccccgctccaggggctggcagtccctgagctttgatggcggggccttccaccttaagggcacaggagagctgacacgggccttgctggttctccggctgtgtgcctggcccccactcgtcactcacgggctgttgctccaggcctggtctcggcgactcctgggctcccggctctcaggcgcatttctccgagcatccgtctatgggcagtttgtggctggtgagacagcagaggaggtgaagggctgcgtgcagcagctgcggaccctcagcctccgaccactgctggcagtgcccactgaggaggagccggactctgctgccaagagtggtgaggcgtggtatgaggggaacctcggtgctatgctgcggtgtgtggacctgtcacggggcctcctggagccccccagcctggctgaggccagcctcatgcagctgaaggtgacggcgctgaccagtactcggctctgtaaggagctagcctcgtgggtcagaaggccaggagcctccttggagctgagccccgagaggctggctgaagctatggactctgggcagaacctccaggtctcctgcctcaatgctgagcagaaccagcacctccgggcctccctcagccgcctgcatcgggtggcacagtatgcccgggcccagcacgtgcggctcctggtggatgcggagtacacctcactgaaccctgcgctctcgctgctggtggctgccctggctgtgcgctggaacagcccgggtgaaggcgggccctgggtgtggaacacctaccaggcctgtctaaaggacacattcgagcggctggggagggatgcagaggctgcgcacagggccggcctggccttcggagtgaagctggtacgaggtgcatatctggacaaggagagagcggtggcccagctcccatggaaatggaagacccccccactcaggctgactatgaggccaccagttcagagttacagcccgctgcctggaactgatgctgacgcacgtggcccgccatggccccatgtgccacctcatggtggcttcccacaatgaggaatctgttcgccaggcaaccaagcgggcaggccggctatgtagtgtataagtccattccctatggctccttggaggaggtaatcccctacctgatccggagggcccaggagaaccggagcgtgcttcagggtgcccgcagggaacaggagctgctcagccaaaaactgtggcggcggctgctgccaggatgccgaaggataccccactagcacccctgagggggtcatgtggtcaataaaagtccttaggtgctgcctaaaaaaaaaa

SEQ ID NO: 350 - DNA, 1062 bp, Homo sapiens
  misc_feature (1)...(1062): n = a,t,c or g
ttttttttttttccagtcattaatgatctgtccttttgagatcttttacttcagaggaagatttaggcaagagagcaacatataatagtcagtgatacaaagaagggcatggaacatttggggaacacaggggtttggagggcctgaagcacaggggtggtggtattagaaatgtgggaaatatgggccatgagcctccggacagaatggggtccaggaaggacagcatcacacactggtgctggaatttggggatccttctgtgggcaacctcagcagtctggttattggcccttttttcttacagcctggaaaactggaccaagtttctattgatctcagcgaccgaccggcagcctgtaaggggccatggaagtgtggaactcatttgttaaaatgttcaaaacttccttaacaccatgttcacccttgcaggcaaggccccataggattggtctcccaagaaaaatgcacttagctccaagggccagagccttctgcacatcattgccagttctgaccccggcatccaggtagtacttcatgttcccctattcagcagctcctacttctgtcaaagcatcaattgaagcaagaacctcatcaagctgcctcccaccatggttggaaacaatgataccctggacattgtgcttcacagctaactctgcatcctcttttgtcaaaatccctttcaggatgatgggcaatcgagttatgctctgaaaccaggagagatcattccagcagagagaagtgctgataggagtcatctggaaataaggtattgcatttccctttttaggtgattgaagatctgttagtgttaagttcctcctcaactggtttcgaatgtcatgtcgcctgttgccacatacaggtgtatccaaagttattaccaaagctttgaaacctagggattctaccctctggatcaactgtttgttcagctgcaggtctggatgcacatagagttggaaccatcggaggccttcgggagctcttgctgtgctcatttccccgaattccaccacnctggactagtgttctcaaaannntcga

SEQ ID NO: 351 - DNA, 1227 bp, Homo sapiens
cagttttttttttttttttttgctgcatgattttattactataaatatacagtaaaaacgaaccaacgatgagcccatctgagcacatcagacggcagcacatgggagtcccagcgggccactctgcggcccgaacttcacgcaaagctctggcaccaggactgatggccagaggctggggccttggtgggggcggggggcgggcggtgcagggggctgtgtgtgttgttggggagaggtgcatggggggagagaggtgcttggggtggggtagaggtgcgtgggagatgctcggtccgagtgcacacacatgcatgggaacatgtgcaggagtatgtgcgtgtgtgtatgcgtgacagcatgtgtgagcgtgagtgtgcatgtgtgaacgtgtgcgtgagcatgtgcaagtgggcgtgcatttgtgtgtgtgtacgtgtgagcgcatctgcgtgcctgtgcacgagcgggaggggtggctggcctgggtgtgcagggagctgggtgtgaggaccgtgctgtccactgctgggtctcgcccaggaggcagagctcatgctcggagccaccgtgagcctcagggagggtactgagctgccccacagccgacctgtccccaggcccccactgcagggcagccctccagagccaggtgagcagcagacaccttgcctggcccaaggctccgcaggggtggatccatgccctgggtcaccacggcccaggcactccctttgccatctgcggccccaggaggtttacctataaaaaaaacaaacaaacaaacaaacaaaacaggacgaggtcgcccagaggccaagcctccccggccgggaccccattccccaggtgtgctgctggcttcctcctccctgggcccagcctgccacagaaagcctgagacagaacaaaccaaatcagagagaactgcaagggggccgggcgcggaggctcacgcctgtaatctcagcactctgggaggccgaggcaggtggatgaccttaggagtttgagaccagcccggccaacatggtgaaatcccttctctactaaaaatacaaaaaaattagccgagcatgctggtaggcacctgtaatccccagctactcaggagcctaaggcaggacgatcacttgaacccgggaggcggaggttgcagtgacccgagattgagccactgcactccagcctgggcagcaagagtgaaactccatctcaaaaaaaaaa

SEQ ID NO: 352 - DNA, 1194 bp, Homo sapiens
ttttttttttttatgattttaatatactttatttatttaaaaagtacacagttttaaattggtttcaataggtttcaagcagaagggacactgcctaccacttgcggtcccatttctgatgaagggtgattatcatgtggcaaactcacatttgcatgactggcaaagtaaaaagatagataactttttgtcaacatatctttaagagtttatatcacgcacagtttaaaatcatgacgagatgctgatggttggactatattcatgtctcgtatgttgcaccatattttggttcacagtttatccatgatttagcatgccaagagaacatctcagtcagtaagagaacatctcagtcagtgtcaccttgagaagagcatcaaaagcagagggagcagaaggaggaccgtctgggcttggagactcggcgcacccccacactccctcgcattctcctcaggatggaagccatgacaagattctgggcgccttctgatcttctgggcctttagacgttcacacttaagggattcattatgttgactgtagttaaggcatgtttccaaggattgcttttttctactctgcatttcagaggtcaaaatttggcaatgacaactctcttaactactctctctctccaacagtggaaaggatgtaattttccttctctaatatttctcccccaggtttccttaccactgataccccttactggtttccgtggtagtgagtggacctgcacacaaaaggatatacctgatttcaatgggtgccatggtgatgggggccacagattcacagaggcagctgctgtccaccaccaccatgaacaggttgctgcttgggatttgctggatgacaaaggacctgttggaacaagaggtagcgaggcagtcatttaccatccgtcaattaaagagccatgaggaagacttctctcctgggtggtagcaactaccatattttgtaaagcaaattttggagactattttactactaatgttaccttctttctccatgaggctcttcacttacaaatacctagcttcactaggaaaacaacaatagctatgacgacatgcggctcatacaactcaccttggaaagactgaagtgctgtatgtacaaaacacaagagtcagagttggctgaatcacctgttcccaaggtttaagaggtcagactttcaaa

SEQ ID NO: 353 - DNA, 1140 bp, Homo sapiens
actctcacaattaaaacatttggaaaggaattaatggtgtatttccattagggaaagtgctgacaagccgcaagggatcccttgatggttctgggcatgggcgcccagcctgggctctggctttgggagcagcgaggggaatgtgtctctcacccctaggcctcctggtctggctcctgctcaggccacacggcgcacccacccccagcgcgcctcagtccaggtcactgggcagggtgtttactgctgcgctccaacccaagcatgtagatttcagaaggggactaggacccccggcaggtgtttgagaccaccggctcccaagtgcgtcgccttgggggtttgcatcggctcctcagcctccccaggcaatctctgtgtagggtcgggagcgggaggtctgagttgagccgggtgcctgagatctccggtgcaggtcgggggaggggagcccccctcgggctgtggttagagcgggagaggaacttcccagactagctggcacagagcctcgggaaggcggcgggcactgcaggtggtttacgggaagtgctgcagccttggggtggggacagcgtggccagacccaccgcctcatctgcacacctgggctcaagcgctaatgacgacaggggactgagtgaatgggacccccatggacccgcgcgcctgccccacgccatggcctgggtttcgggagccttgctttattctgcctcgggtcggaggctgggggagcgagacctccagtgcccgtgcggctgggggagagggtggaggggccacttagatgtaggagtcatcaccaccgggcgcatcgtagggacccccacccctccccgcgccctcgccctcatcgccgctgccggagtcactggcgccatccacgtccagggtgggcgcgttgagaacgaccacgtctgcctccgtcccgatgtcctcgccaaaccagacagccttgtacccgccctctggccgccgctccttggtcaggatggacctcaccgccgtggggcttccgccagctcgggccgctgcggggggctcaagggcaccgcctggggaggcagggccggggggtgcgggctatgcgggcatcggtgcctccgcgggcttggggtcgtgcgtggggctggggac

SEQ ID NO: 354 - DNA, 2401 bp, Homo sapiens
agttaatctctttggctgggcctacagatgacatacagagtacaggcccccaggttcatgctttaaatatccttagagcattgttcagagatacgcgcctgggagaaaatattattccttatgttgctgatggagctaaggctgcaattctgggttttacatcaccggtctgggcagtgcgaaattcatccacacttctctttagtgccttgatcacaagaatttttggagttaaaagggcaaaggatgaacattccaaaacaaatagaatgacagggagagagtttttctctcgtttcccagaactctatccttttcttctcaaacagttggaaactgtagccaatacagtagacagtgatatgggagaaccaaatcgtcatccaagcatgtttctcttacttttggtgttggagagactctacgcttccccgatggatggtacttcttctgctctcagcatgggaccttttgttcccttcattatgaggtgtggtcactcacctgtctaccactcccgtgaaatggcagctcgtgccttggtcccatttgttatgatagatcacattcctaataccattcgaactctgttgtccacactccccagctgcactgaccagtgtttccggcaaaaccacattcatgggacacttctccaggtttttcatttggtgcaagcctactcagactccaaacacggaacgaattcagacttccagcacgagctgactgacatcactgtttgtaccaaagccaaactctggctggccaagaggcaaaatccatgtttggtgaccagagctgtatatattgatattctcttcctattgacttgctgcctcaacagatctgcaaaggacaaccagccagttctggagagtcttggcttctgggaggaagtcagagggattatctcaggatcagagctgataacgggattcccttgggccttcaaggtgccaggcctgccccagtacctccagagcctcaccagactagccattgctgcagtgtgggccgcggcagccaagagtggagagcgggagacgaatgtccccatctctttctctcagctgttagaatctgccttccctgaagtgcgctcactaacactggaagccctcttggaaaagttcttagcagcagcctctggacttggagagaagggcgtgccacccttgctgtgcaacatgggagagaagttcttattgttggccatgaaggaaaatcacccagaatgcttctgcaagatactgaaaattctccactgcatggaccctggtgagtggcttccccagacggagcactgtgtccatctgaccccaaaggagttcttgatctggacgatggatattgcttccaatgaaagatctgaaattcagagtgtagctctgagacttgcttccaaagtcatttcccaccacatgcagacatgtgtggagaacagggaattgatagctgctgagctgaagcagtgggttcagctggtcatcttgtcatgtgaagaccatcttcctacagagtctaggctggccgtcgttgaagtcctcaccagtactacaccacttttcctcaccaacccccatcctattcttgagttgcaggatacacttgctctctggaagtgtgtccttacccttctgcagagtgaggagcaagctgttagagatgcagccacggaaaccgtgacaactgccatgtcacaagaaaatacctgccagtcaacagagtttgccttctgccaggtggatgcctccatcgctctggccctggccctggccgtcctgtgtgatctgctccagcagtgggaccagttggcccctggactgcccatcctgctgggatggctgttgggagagagtgatgacctcgtggcctgtgtggagagcatgcatcaggtggaagaagactacctgtttgaaaaagcagaagtcaacttttgggccgagaccctgatctttgtgaaatacctctgcaagcacctcttctgtctcctctcaaagtccggctggcgtcccccaagccctgagatgctctgtcaccttcaaaggatggtgtcagagcagtgcccacctcctgtctcagttcttcagagagcttccaccagctgctgagtttgtgaagacagtggagttcacaagactacgcattcaagaggaaaggactttggcttgcttgaggctgctggcctttttggaaggaaaggaaggggaagacaccctagttctcagtgtttgggactcttatgcagaatcgaggcagttaactcttccaagaacagaagcggcatgttgaagaaaatctgggggattgggatgggggtatgtgtggatttttcctccactaaatctgcaggaaacatgttgaacataaattcaaaaattttatcccaaaaaaaaaa

SEQ ID NO: 355 - DNA, 2186 bp, Homo sapiens
cggataaagacgctgggagattgacatgcatttcgaccaatagcattgcagagaggcgtatcatttcgcggatgttccaatcagtacgcagagagtcgccgtctccaaggtgaaagcggaagtagggccttcgcgcacctcatggaatcccttctgcagcacctggatcgcttttccgagcttctggcggtctcaagcactacctacgtcagcacctgggaccccgccaccgtgcgccgggccttgcagtgggcgcgctacctgcgccacatccatcggcgctttggtcggcatggccccattcgcacggctctggagcggcggctgcacaaccagtggaggcaagagggcggctttgggcggggtccagttccgggattagcgaacttccaggccctcggtcactgtgacgtcctgctctctctgcgcctgctggagaaccgggccctcggggatgcagctcgttaccacctggtgcagcaactctttcccggcccgggcgtccgggacgccgatgaggagacactccaagagagcctggcccgccttgcccgccggcggtctgcggtgcacatgctgcgcttcaatggctatagagagaacccaaatctccaggaggactctctgatgaagacccaggcggagctgctgctggagcgtctgcaggaggtggggaaggccgaagcggagcgtcccgccaggtttctcagcagcctgtgggagcgcttgcctcagaacaacttcctgaaggtgatagcggtggcgctgttgcagccgcctttgtctcgtcggccccaagaagagttggaacccggcatccacaaatcacctggagaggggagccaagtgctagtccactggcttctggggaattcggaagtctttgctgccttttgtcgcgccctcccagccgggcttttgactttagtgactagccgccacccagcgctgtctcctgtctatctgggtctgctaacagactggggtcaacgtttgcactatgaccttcagaaaggcatttgggttggaactgagtcccaagatgtgccctgggaggagttgcacaataggtttcaaagcctctgtcaggcccctccacctctgaaagataaagttctaactgccctggagacctgtaaagcgcaggatggagattttgaagaacctggtcttagcatctggacagacctcttattagctcttcgtagtggtgcatttaggaaaagacaagttttgggtctcagcgcaggcctcagttctgtataggcaatgctgtgttattacttgaatatagaatatatagtttacaaaatgaaaattccaatgttctcaccaaatatatgccttcgtgtgtccaaagtataattattttagatgctaattttgaatagtttattaaacagttataaatatgcaaagtagctggcatgtagtgtcacggattttctggatagaggaagtgattggaagtattccacttaaagccatggaattagcaatagtttgctttttaatagaaggcccatttgtaagaatgttgaaaatatgtgtaccgtttaaagaaaaagcagctttaaagtgacaaacaaaataccctttttcttttagtatgggttatttttctaggttttctgtccctccctcagtagtgaagagttttctttattcctggcagtgtcaggaatattggtttgaaaagctgttggcctatctggagtttggccttgttaacctagtattctaaccagttaaccagccttagtatgcattaaaattgtattgttcagaaagtttgtttctcattttctgcaaattcttactttgaaaatgaatcaccacatagtatgtccctttaaagcattgacgcacagacaaatgtttaaagcacagtaaatacaaatatatgcctttggatattaaattaatgcttgatgataaaagaatcaaacttttttttttttgaaagggagtctcgctttgtcacccaaactggagggcaggggggggatcactgttaagggcaacctttgcctcccaggatcaagcaattttgactcaccctcccaagtagctgggattacaggggcaggccaccatgcccggctaattttttgtatttttagtaaaaacggggtttaaccatgctggccaggctggtctcaaacacctgaccttgggatccgtcc

SEQ ID NO: 356 - DNA, 1142 bp, Homo sapiens
attcacatcttattcagcatcaaagaattcacacatgagagtaagcacatgaatgtaatgaatgtggaaaagctttcagtcaaacctcatgccttattcagcatcacaaaatgcataggaaagagaaatcgtatgaatgtaatgagtatgagggcagtttcagtcatagctcagatcttatcctgcaacaagaagtcctcaccagacagaaagcctttgattgtgatgtatgggaaaagaactccagtcagagagcacatctagttcaacatcagagcattcataccaaagagaactcatgaatgtaatgaagatgggaagatatttatcaaattcaggcttcattcagcatctgagagttcacaccagggagaaatcatgtatgtactgcatgtggtaaagccttcagtcatagctcagccattgctcagcatcagataattcacaccagagagaaaccctctgaatgtgacgaatgaagaaaaggtattagtgttaaactcttaatcgactcctgcaaatctataccagtgagaaatcttacaaatgtattgaatgtggcaaatttttcatgctattagtattttcataccttagtcacatttggagaattcacatgggaataaaattccattgctgcaatgaatgtgaaaaagccatcagtcaaagaaactaccttgtttagtatcaaattcacgccatgcaaaaagattataaatgtaataagcatgtatgtgtgtgaggagattcagtcataacccaacgctcattcaacatcaaagaatttatacctaagagaacttatttgggtgtagtaaatggcagatctttcaataggagtttaactagtctttgtcatatcagaatatccatagtagacaagaatttgatgtaacgcaaatggaaaaactcgacaccacatttcaggctttacccaacatcgaaataatggagagaaaattgttgattatttgtttatgaaattgttaatacatagtcccaatctttttcattgcacaaaaatctagggttgacttggtaaatgcagtgacattttctcatggagttcctttatttaatatgtattctaagtaggtacgtttatttttacttttttattataattttgatattaaaaagaa

SEQ ID NO: 357 - DNA, 3167 bp, Homo sapiens
  misc_feature (1)...(3167): n = a,t,c or g
ggaattcgcgagcgcagggcgcatgactggcaggcagctccacctgcagccctggtgccggatccactaggtgaagccagctgggctcctgagtctggtggggacgtggagagtctttatatctagctcagggattataaacacaccaatcagcaccctgtgtctagctcaaggtttgtgagtgcaccaatcgacactgtatctagctgctctggtggggccttggagaacctttatgcctagctcagggattgtaaatacaccaatcagcaccctgtgtttagctcaaggtttgtgaatgcaccaatcgacactctgtatctagctgccctgatggggacgtggagaacctttgtatctagctcagggattggaaacgcaccaatcagcgccctgacgaaacaggccactcggctctaccaatcagcaggatgtaggtggggccagataagagaataaaagcgggctgcccgagccagcattggcaacccgctcgggtccccttccacactgtggaagctttgttctttcgctctttgcaataaatcttgctactgttcactctttgggtccacactgcttttatgagctataacactcaccgcaaaggtctgcagcttcactcctgaagccagcgagaccacaagcccactgggaggaacgaacaactccaggcgcgcaatgaacaactccaggcgcgccgccttaagagctgtaacactcaccgcgaaggtctgcagtttcactcctaagccagcgagaccacgaacccaccagaaggaagaaactccaaacacatctgaacattagaaggaacaaactccagatgcgccaccttaagagctgtaacactcaccgcgagggtccacggcttcattcttgaagtcagtgagagaccaagaacccaccaattccggacacattttggcgaccatgaagggactttcgcctattgccaagcggtgagacaatcgctgagcagtgagaccatcacctattgccgagcggtgagaccattgcctatcgccaagcaaatcgaggccatcaagctacagatggtcttacaaatggaaccccaaatgagttcaactaacaacttctaccgaggacccctggactgaccagctggtcctggcacttcccctggcctagagagttcccctctgaaggacactacaactgcaaagccccttcttcgcccctatccagcaggaagtagctagagcagtcatcggccaaattcccaacagcagttggggtgtcctgttgattgaggggtgacagcatgctggcagtcctcacagccctcactcgctcgctcactctcggcacctcctctgcctgggctcccactttggcagcacttgaggagcccttcagctctgtatctagctactctgatgggtccttggagaacctttatgtctagctcagggattgtaatacaccatcagcaccctgtgtctagctcaggtttgtgaatgcaccaatggacactctgtatctagctactctggtggggccttggagaaccttgtgtcaacactctgtatctaactaacctggtggggatgtggagaaccttgtgtctagctcagggatgtaaacgcaccaatcagtgccctgtcaaaccactcggctctaccaatcagcaggatgtgggtggggccagataagagaataaaagcaggctgcccgagccagcagtggcaacccgctcaggtccccttccacactgtggaagctttgttcttttgctctttgcaataaatcttgtactgctcactctttgggtccccactgcttttatgagctgtaacactcactgcgaaggtctgcagcttcactcctgagccagtgaaaccatgaacccaccagaaggaagaaacgctgaacacacctgaacatcagaagaaacaaactccagacgcgccaccttaagagctggaacacttaccgcaagggtccgtggcttcattcttgaagtcagtgagaccaagaaccccccaattccggatacaatatcgacaaaacatgcatctttgatgtctgatagttacagagagaagaaattagttcctgtggtttacccccattctagcactccctccttccagtaattcctggaaggagggagtgcaccaatcgacactctgtatctatctactctggtggggccttggagaacctttatgtctagctcagggattgtaaatgcaccaattggcactctgtatctagctcaaggtttgtaaacacaccaatcagcaccctgtgtctagctcagggtttgtgaatgcaccaattgacactctgtatctagctgctctggtggggccttggagaacctttatgtcgacactctgtatctagctaatctggaggggatgtggagaaactttgtgtctagctcagggattgtaaacgcaccaatcagcgccctgtcaaaacaggccactcagctctaccaatcagcaggatgtgggtggggccagataagagaataaaagcaggctgccccaaccagcattggcaaccccgctcgggtccccttgcacactgtggaagctttgttctttcgctctttgcaataaatcttgcaactgctcactctttgggtccacgctgcttttatgagctgtaacactcaccgcgaagatctgcagcttcactcctgagcccagcgagaccatgagcccaccggcaggaacgaacaactccagacacgctgccttaagagctgtaacactccccgtgaaggtctgcagcttcactcctgagccagcgagatcacgaacccaccagaaggaagaaactccgaacacatccgaacatcagaaggaacaaactccggaggcgccaccttaaaagctgtagcactcactgcgagggtccgcggcttcattcttgaagtcagtgagaccaagaacccaccaattccggacacaaaaccctgtctctactaaaaaatacaaaaaaattagcgcggtggggtggccggcgcctgtagtccggctactcangaggctgaggcaggagaatggcgggaacccgggaggcggagcttgcagtgagccaagatggcaccactgcactccagcctggtggacagagtgacattctgtctcanaaaaaaaaagaaaaaaacccattggttaaaaacaaaa

SEQ ID NO: 358 - DNA, 4747 bp, Homo sapiens
ttttttttttttgaattaattgatgaggtttatttgattgtctttcttataaaatacattaaaaatactgcttttaactgtaggcacacaattaaaacaaatgtaaacctatgtttaatttaaaatatattaaaatgatttaataaaggtcttttattattttacacatcaaatttcatgcaatcagtactccactgaaggagaaaaggattatgaaaaaacaatgaaagcacagggtaggaaaataaacaacacaaaagactaattctggattttttttctgtgtccttaataccctgtgctgtctttgacaacaaagatgccttacttatgtgattcagaggcccggaagtgaaaaaaatacaagtagttaatgaataatgcatatgttcatagcaatggtcaaattatactgtttcctaatggataccatttttctttatcgagtgggacactacagagtcggatgttaattgctcccacaaatacagttttactcttcacaataagcattaagacatgtccttggagctctgtgacttcatcatatactacaatttcattgtaagtggggtccgtacattttggaacagattttgttttcctcctacgaacttcactgggatatggtaaaagataaaattcaacatgtgcactgggcgcagagccatctgggagatgaatgtttttcatgtgtttcactagtatggtcagcttcacatcctcgtaggatatgactaactgcaccttaggcttcttgtctggaaacttctcacctaggtacacaggtgatgattcttcaactgtttgttgcccagcctcagagaggaaaaagctaagtacacaatcactgtttgtaacttcatgtgatacatttaatatctgttccatgtaatgatttagatctctgaatcttctgtgatctgaatttgtaaaaggtaggtgccaccaatgaggaaactctgggagagtcagtgatgcaaactgcttctgaagttggctgtgaagttttgaaaactgctcaaatgatttttctgtcaggcttgtttcgttgttgctgtgtgtcacctggatcagatacagattactggatttcttgctgaaccctaaaattgttgctctttcaatcgacctagttgtactcagcaaacaggattcctgaggaaaagtctgtgaagtagatttggcagggcttatggctgacatttgtgcaagtgtgtggatcaagttattcaatttaacagggaaacactccagactttcctttattttcttggtaaaatgacttgttgcttccaggtctgtgtcttgtggacgaagattattatacacatatttcaggtcttgaaatcccacttagctcaggcagtccctgcatacagcatcatttcccagcaggttccaagagcagttggctgtgctttctgataatattataagcacgacagcaaagttcccacaaaatcttgaaaatgctgtgggtttttccccaccctctgtaataaagtattcccatctctgaagtaaaaatgaaaggagctcggtccctttttatccctccaaatgtttgtgcatgacctaagaattttccaaagtcaatatgaaacatgtggcccgactttgtcagcatgatattatcattgtgacggtcacatactcccaggatgaatgttaccacacaccagccagcacaggagtagaaaaagttcctcaaggccttttcataatctgcctttaagtggttgtgctgactgaaccactttttaatggtattttctttcaatggtcctatcagtccagaatggcgatgaatctttgctagggtcacagcatcaggtaccatctgcaccaatcgttggtcttttcctgtggatagacatctataaatgatcatttgcatatccaagccttcctgcagccaaatattgtccatcacttgaataagctgcagaacaagcatatcctgacgaagatcatctccagccttaaaaataatgctgatgtttttgcccatcagattagcattgatgaaagtaatcttcaatggcaaagcattagatgtaaaatatgaacatgcatcgtgatcaatcccttttatacatagggcagggttcagaggaagatgacaagtatttacatcttgaaagaactcttctagtctgccaatttctttcttcagtacctcctgtctttgatggtcactggcagacttgactctttccccaatatctcccagaattttgataagtttctgctccttggaaaactcatcattcaaggctttacctgcacagaattggagagcagctagtagcttctgataccagcttttaaaataagcttcattttctgcattttttagcagccagtaaagacgatgggcaacctggatgctctgcaaggagcggtggagtagaagttgcactaaaggactctcaaggttccattcaaacttgacagcctgaactagctgtgggagatattccagtagttcatcattcaagaggttgtctaattgttgaactgccactttacgaatttcttgatctggaaaactggaagtcaaaagcccaagagcctctaaaggttgagaaaatgtccatcttctcaaaatggtatgcatttctgaaacagtcctttcatcccatccaggggcactacccaggactaaaggaagggagcagttttcattattgcagtagaagcgataaaaccataaatatcttttcttttcttcagagagtagtaggggagtctgtttctgtgaaagtctggcaatatgttttatacactcctttagtggctcttcaagattacttctattctcttcagaatcaggtttcatatactcccacccagtagctggaaaatcaatctgcagggtcaccggggatggctgacttacatcccacactcctggagttatcatttctacgggaggctcactctgtaatgtcatgctgaacagcatagacccgagaatggatttttcttttggaaacagtggaagacaagtccacgccagtaaatttgcattgttggttgcacaggcaatcccaaacagttttacagtgagcatggattcccttggaagtgactttatttcaaggggaaaattgatcctgtgcacccaggtttctggaatgttgtgtgctgcatacactgtgaagctgaggtgggaaggaagcccgggatttagataggaagtgcatctaggtacatttacaggctgaaaatctgcataaaagctgttacagtagacattgattagctggtagatggatgtggatagttcagttgttaccttctctatcaagccttttgctgaagtctctgaactttgataaaaattctctccttttctctgaagaattagacttagttcatttactgcatctgtaatttgtttggtttccacacaccctagaacactgcatatttttttaacttcttcaataatattatacacgttttcctgggttttcaataggtatttcaggtggaagtcatattttctgatgagtgttaagagacattgtctggatactttccaaatatgcataaattctagaagttgattcagataaaactgactgtggtcctcttcatgctttcgagatagctttcctggagcttccctacttttctgcaggtggagctgaataacagatttatctttttgaaacattttgtggctccccaaacagtggtcgttttgtaaaaattcttcagagccccatacacttagaatatgatctttggggagtagctggtcatttgtgcaaaaatgcagaatttctgcaattagatctttgacaagataattagcacatggcataaaatgaagaggttgtgttgagttatcaataaaaatatgtatattaaacttggtcttagaaaagagctgatacggaaatgctgtagtagtgctccagatcttcccagaattgaaattaacatcagctgcatgatatctttctctgattttttttactttgttgcaaaaagaggccagactcgtattgctgctttgaggtacttccactagctgaatggaacaacctattgactctatattcttctgccatgtactttcccacattccgggttgaagagagcctttcaaaagcatcaaagatggttccacaatgttcacatgtccactccttttattctcttctttcggcatgaagtcacttgagaaggatgaatttgttggaggaatgctactttcaaatcctatatggtagttatgattttcattttctaattctttctctagattaattttatccaaacttgtgaatgatggagctaaaatactgaatctggaatcatcagcaccatgatgttttcctatggggcttccccaggagcattctttattcgtattttgaggttttggtaacacagaaggactaaaaccaattgctggtgctttgctaacttgatgccaggagagttcacggcttttagaagtgaattcattcaaggatatttggtgtgcttcatttaatgaatgccctgttgagtcccattttggtgcagtgggcacaaaaaaggtgttttcatcaatttcactctcgtagtgtggaattttgccactgatctcatctactatctgatcaaaacccagactgacttggctagaagaatggggttgatttacaaagagaaattcttggtgttcatactgcttttcgtgtgattcattaggatttggatccgtttgccaagaatatgccat

SEQ ID NO: 359 - DNA, 679 bp, Homo sapiens
ccagacatcatcctagcacttaaggagctggaagcagaggtatcatttaaactacttcctctgcttccagacatcatcctagcacttaaggagctggaaggttgaacagaaattcttcttggaatccttgaaggtttagactccattcttaaagattggattctgaatatcaggtaacatttttatttggaatatatgtatacagcctttttcaaaatccctagggccactcttttgggggtatttaaaaaatgtgttagctggatctgaggcatcctgtaatcaaaaccaatatatatgtagcaaaatgaataacatttttcaaactttttggacttcagaattatggataacagattgtaacctcatataaaatcatacttttgcgctggggaacggtcgtcacgcctgtaatcccagcactttggcaggctgagactggcagatcatttgaggtcaggagttcgagaccagcctggccaacatgacgaaaccccgtctcgactaaaaatacaaaaaaattagctggacatggtggcacccatctctactcccagctacttgggaggccgaagagggaggattgcttgaacccaggaggtggaggttgcagtgagctgagatcatgagactgcactccagcctgggtgacagagtcgagactccatctcaaaaaaaa

SEQ ID NO: 360 - DNA, 2017 bp, Homo sapiens
tttcgtgcgggagatcagaggtcccgccgtcccgcgcctgacctcggctgaggacaggcaccgccatgggccacacgcacacagcccggagttgcagcggaccggcagagattacagcctggactacctgcccttccgcctatgggtgggcatctgggtggctaccttttgcctggtgctggtggccacagaggccagtgtgctggtgcgctacttcacccgcttcactgaggaaggtttctgtgccctcatcagcctcatcttcatctacgatgctgtgggcaaaatgctgaacttgacccatacctatcctatccagaagcctgggtcctctgcctacgggtgcctctgccaatacccaggcccaggaggaaatgagtctcaatggataaggacaaggccaaaagacagagacgacatcgtaagcatggacttaggcctgatcaatgcatccttgctgccgccacctgagtgcacccggcagggaggccaccctcgtggccctggctgtcatacagtcccagacattgccttcttctcccttctcctcttccttacttctttcttctttgctatggccctcaagtgtgtaaagaccagccgcttcttcccctctgtggtgcgcaaagggctcagcgacttctcctcagtcctggccatcctgctcggctgtggccttgatgctttcctgggcctagccacaccaaagctcatggtacccagagagttcaagcccacactccctgggcgtggctggctggtgtcaccttttggagccaacccctggtggtggagtgtggcagctgccctgcctgccctgctgctgtctatcctcatcttcatggaccaacagatcacagcagtcatcctcaaccgcatggaatacagactgcagaagggagctggcttccacctggacctcttctgtgtggctgtgctgatgctactcacatcagcgcttggactgccttggtatgtctcagccactgtcatctccctggctcacatggacagtcttcggagagagagcagagcctgtgcccccggggagcgccccaacttcctgggtatcagggaacagaggctgacaggcctggtggtgttcatccttacaggagcctccatcttcctggcacctgtgctcaagttcattccaatgcctgtgctctatggcatcttcctgtatatgggggtggcagcgctcagcagcattcagttcactaatagggtgaagctgttgcttgatgccagcaaaacaccagccagacctgctactcttgcggcatgtgcctctgaccagggtccacctcttcacagccatcagctttgccctgtctggggctgctttgggataatcaagtctacccctgcagccatcatcttccccctcatgttgctgggccttgtgggggtccgaaaggccctggagagggttttttcaccacaggaactcctctggctggatgagctgatgccagaggaggagagaagcatccctgagaaggggctggagccagaacactcattcagtggaagtgacagtgaagattcagagctgatgtatcagccaaaggctccagaaatcaacatttctgtgaattagctggagtaggagtctgggagtggagaccccaggaaacagcatgaggtgcttactcaggaagtcaggacatttttggcctttggcttaacttccagatgctcagtcggcttggggaaggactgaagggcagctgccaagacctcagttacctcctgacctgagggtggagagtggcaggaagcaagcatgtttgctgtgcacttaggaaaggctggtgagccagagggactgatcaggccccattcactctctactcattaaaaggtcctgagccacgaagcgcttcccattttgaactttctgtcctcacagattctgtttgacagaatctaagggccatcagggaactcttttcatcttgcaaagagaaaaagccagtctttccagaataaatattcatctgtttgaaataaa

SEQ ID NO: 361 - DNA, 2900 bp, Homo sapiens
atggggctcaaggcgcgcagggcggcgggggcggctggcggcggcggcgacgggggcggcggaggcggcggggcggctaacccagccggaggggacgcggcggcggccggcgacgaggagcggaaagtggggctggcgcccggcgacgtggagcaagtcaccttggcgctcggggccggagccgacaaagacgggaccctgctgctggagggcggcggccgcgacgaggggcagcggaggaccccgcagggcatcgggctcctggccaagaccccgctgagccgcccagtcaagagaaacaacgccaagtaccggcgcatccaaactttgatctacgacgccctggagagaccgcggggctgggcgctgctttaccacagcgttggtgttcctgattgtcctaggggtgcttgattctggctgtcctggaccacattcaaggagtatgagactgtctcgggagactggcttctgttactggagacatttgctattttcatctttggagccgagtttgctttgaggatctgggctgctggatgttgctgccgatacaaaggctggcggggccgactgaagtttgccaggaagcccctgtgcatgttggacatctttgtgctgattgcctctgtgccagtggttgctgtgggaaaccaaggcaatgttctggccacctccctgcgaagcctgcgcttcctgcagatcctgcgcatgctgcgggatggaccgggagaaggtggcacctggaagcttctggggctcagccatctgtgcccacagcaaagaactcatcacggcctggtacatcggtttcctgacactcatcctttcttcatttcttgtctacctggttgagaaagacgtcccagaggtggatgcacaaggagaggagatgaaagaggagtttgagacctatgcagatgccctgtggtggggcctgatcacactggccaccattggctatggagacaagacacccaaaacgtgggaaggccgtctgattgccgccaccttttccttaattggcgtctccttttttgcccttccagcgggcatcctggggtccgggctggccctcaaggtgcaggagcaacaccgtcagaagcactttgagaaaaggaggaagccagctgctgagctcattcaggctgcctggaggtattatgctaccaaccccaacaggattgacctggtggcgacatggagattttatgaatcagtcgtctcttttcctttcttcaggaaagaacagctggaggcagcatccagccaaaagctgggtctcttggatcgggttcgcctttctaatcctcgtggtagcaatactaaaggaaagctatttacccctctgaatgtagatgccatagaagaaagtccttctaaagaaccaaagcctgttggcttaaacaataaagagcgtttccgcacggccttccgcatgaaagcctacgctttctggcagagttctgaagatgccgggacaggtgaccccatggcggaagacaggggctatgggaatgacttccccatcgaagacatgatccccaccctgaaggccgccatccgagccgtcagaattctacaattccgtctctataaaaaaaaattcaaggagactttgaggccttacgatgtgaaggatgtgattgagcagtattctgccgggcatctcgacatgctttccaggataaagtaccttcagacgagaatagatatgattttcacccctggacctccctccacgccaaaacacaagaagtctcagaaagggtcagcattcaccttcccatcccagcaatctcccaggaatgaaccatatgtaggccagaccatccacattcagaaattcgaagaccaaaggcattgatgggggaagtttgttaaaagtttgaaaggacaggtttcagggactggggaggaagctggacttcctcgtggatatgcacatgcaacacatggaacggttgcaggtgcaggtcacggagtattacccaaccaagggcacctcctcgccagctgaagcagagaagaaggaggacaacaggtattccgatttgaaaaccatcatctgcaactattctgagacaggccccccggaaccaccctacagcttccaccaggtgaccattgacaaagtcagcccctatgggttttttgcacatgaccctgtgaacctgccccgagggggacccagttctggaaaggttcaggcaactcctccttcctcagcaacaacgtatgtggagaggcccacggtcctgcctatcttgactcttctcgactcccgagtgagctgccactcccaggctgacctgcagggcccctactcggaccgaatctccccccggcagagacgtagcatcacgcgagacagtgacacacctctgtccctgatgtcggtcaaccacgaggagctggagaggtctccaagtggcttcagcatctcccaggacagagatgattatgtgttcggccccaatggggggtcgagctggatgagggagaagcggtacctcgccgagggtgagacggacacagacacggaccccttcacgcccagcggctccatgccctctgtcgtccacaggggatgggatttctgattcagtatggaccccttccaataagcccatttaaaagaggtcactggctgacccctccttgtaatgtagacagactttgtatagttcacttactcttacacccgacgcttaccagcggggacaccaatggctgcatcaaatgcatgcgtgtgcgtggtggccccacccaggcaggggcttcccacagcctcttcctccccatgtcaccacaacaaagtgcttccttttcagcatggtttgcatgactttacactatataaatggttcccgctaatctcttctaggataaaaaaaaaa

SEQ ID NO: 362 - DNA, 5433 bp, Homo sapiens
cggacgcgtgggatcattgaatttgacccaaagtatactgccttcgaagtggaggaagatgttgggctgatcatgatcccagtggtgaggctacatggaacttatggctatgtgacagctgatttcatctctcagagctcctctgccagtcccggaggtgttgattacattttgcatggcagtacagtcacctttcagcatgggcaaaacttaagttttataaatatctccatcattgatgacaatgaaagtgaatttgaggagcccattgaaattctactcactggagctactggaggagcggtccttgggcgccacctagtgagcagaatcataatagctaagagtgactctccctttggagttataaggtttctcaatcaaagcaaaatttctattgctaatcccaattccacaatgattttatcactggtgctggagcggactggaggactcttgggagagattcaggtgaactgggagacagtaggacccaactctcaagaagccttactgccacagaatagagacattgcagacccagtgagcgggttgttctattttggagaaggagaaggaggagtgagaaccataattctgacaatctatcctcatgaagaaattgaagttgaagagacattcattattaaacttcatcttgtgaaaggagaagctaaattagactccagagctaaagatgttacattaaccatacaagagtttggtgacccaaatggagttgttcagtttgctcctgaaactttgtctaagaagacttattcagagcctctggctctggaagggcccctgctcattaccttctttgtcagaagagtcaagggcacctttggagagattatggtttactgggaattaagtagtgagtttgacattactgaagactttctttccaccagtggatttttcaccattgctgatggagagagtgaagctagctttgatgttcatttgctaccagatgaggtacctgagatagaggaagattatgtgatccagcttgtttctgtagagggaggagccgaactggatctggagaagagtatcacatggttctctgtttatgcaaatgatgacccacatggagtatttgccctgtattcggatcgccagtcaatacttattgggcagaaccttattagatccatccaaattaacataacccggcttgctggaacatttggagatgtggctgttgggcttcgaatatcatcggatcataaagaacagccgattgttaccgaaaatgcagagaggcagctggtggtcaaagatggtgccacatataaagtggacgtggtgccaataaagaatcaggtcttcctatcactgggctctaatttcactttgcaactggtgactgtgatgcttgtcggtggacgtttctatggaatgccaacaattcttcaggaagcaaaatctgctgtccttccagtctctgagaaagctgccaattctcaggtcggatttgaatccactgcttttcaactcatgaacatcactgctggcacaagccacgttatgatttctaggagaggcacatatggagctctctcggttgcctggaccactggatatgctcctgggttagaaattcctgaattcattgttgttggcaacatgaccccaacactggggagcctttcattttcccacggtgaacaaaggaaaggagttttcctgtggacgtttcctagccctggttggccagaggcctttgttcttcacctatcaggagtgcagagcagtgctcctggcggagctcaactccgatcaggtttcattgttgctgaaattgaaccaatgggcgtcttccaattttccactagctcaagaaatatcatagtgtcagaagatacacagatgatcagattacatgtacaaagactatttgggttccacagcgatcttattaaagtttcttatcagaccactgcaggaagcgccaagccactggaagattttgagcctgttcagaatggggaactgttttttcaaaaattccaaactgaggttgattttgaaataaccattattaatgatcagctttctgagatagaagaatttttttacattaaccttacttcagtagaaattaggggattacaaaagtttgatgttaattggagcccacgcctgaatctagatttcagtgttgcagtgattacaatattggataatgatgacctggcaggaatggatatttccttccccgagacaactgtggctgtagcagttgacacaactctcattcctgtagaaactgaatccaccacatacctcagcacaagcaagacgactaccattctgcagccaaccaacgtggttgccattgttactgaggcaactggtgtatctgccatccctgagaaacttgtcacccttcatggcacacctgctgtgtctgaaaagcctgatgtggccactgtaactgccaatgtttccattcatggaacattcagccttgggccatccattgtttatattgaagaggagatgaagaatggcacattcaacactgcagaagttcttatccgaagaactggtgggtttactggcaatgtcagcataacagttaaaactttcggtgaaagatgtgctcagatggaaccaaatgcattgccctttcgtggtatctatgggatttccaacctaacatgggcagttgaagaagaagactttgaagaacaaactcttacccttatattcctagatggagaaagagaacgtaaagtatcagttcaaattttggatgatgatgagcctgaggggcaggaattcttctacgtgtttctcacaaaccctcaagggggagcacagattgtggaggggaaggatgatactggatttgcagcttttgccatggttattattacagggagtgaccttcacaatggcatcataggattcagtgaggagtcccagagtggactagaactcagggaaggagctgttatgagaagattgcaccttattgtcacaagacagccaaacagggcctttgaagatgtcaaggtcttttggcgagtcacacttaacaaaacagtcgtcgtgctccagaaggatggggtaaacctgatggaggaacttcagtctgtgtcagggaccacaacctgtacaatgggtcaaacaaaatgctttatcagcattgaactcaaaccagaaaaggtaccacaggttgaagtgtatttttttgtggaactatatgaagctactgctggagcagcaataaacaacagtgccagattcgcacagattaaaatcttagaaagtgatgaatctcaaagccttgtgtatttttctgtgggttctcggctggcagtggctcacaagaaggccactttaatcagtctgcaggtggccagagattctgggacaggactaatgatgtctgttaactttagtacccaggagttgaggagtgctgaaacaattggtcgtaccatcatatctccagctatttctggaaaggattttgtgataactgaaggcacattggtctttgaacctggccagagaagcactgtattggatgtcatcctaacgccagagacaggatctttaaattcatttcctaaacgcttccagattgtcctttttgacccaaaaggtggtgccagaattgataaagtgtatgggactgccaacatcactcttgtctcagatgcagattcgcaggccatttgggggcttgcagatcagctacatcagcctgtgaatgatgatattctcaacagagtgctccataccatcagcatgaaagtggccacagaaaacacagatgaacaactcagtgccatgatgcatctaatagaaaagataactactgaaggaaaaattcaagctttcagtgttgccagccgaactcttttctatgagattctttgttctcttattaacccaaagcgcaaggacactaggggattcagtcactttgctgaattgactgagaattttgccttttctctgctgactaatgttacttgcggctctcctggtgaaaaaagcaaaaccatccttgatagttgcccatatttgtcaatattggctcttcactggtatcctcagcaaatcaatggacacaagtttgaaggaaaggaaggagattacattcgaattccagagaggctactggatgtccaggatgcagaaataatggctgggaaaagtacatgtaaattagtccagtttacagagtatagcagccaacagtggtttataagtggaaacaatcttcctaccctaaaaaataaggtattatctttgagtgtgaaaggtcagagttcacaactcctgactaatgacaatgaggttctctacaggatttatgctgctgagcctagaattattcctcagacatctctgtgtctcctttggaatcaggctgctgcaagctggttgtctgacagtcagttttgcaaagtgattgaggaaactgcagactatgtggaatgtgcctgtttacacatgtctgtgtatgctgtctatgctcggactgacaacttgtcttcatacaatgaagccttcttcacttctggatttatatgtatctcaggtctttgcttggctgttctttcccatatcttctgtgccaggtactccatgtttgcagctaaacttctgactcacatgatggcagccagcttaggtacacagattctgtttctggcgtctgcatacgcaagtccccaactcgctgaggagagctgttcagctatggctgctgtcacacattacctgtatctttgccagtttagctggatgctcattcagtctgtgaatttctggtacgtgctggtgatgaatgatgagcacacagagaggcgatatctgctgtttttccttctgagttggggactaccagcttttgtggtgattctcctcatagttattttgaaaggaatctatcatcagagcatgtcacagatctatggactcattcatggtgacctgtgttttattccaaacgtctatgctgctttgttcactgcagctcttgttcctttgacgtgcctcgtggtggtgttcgtggtgttcatccatgcctaccaggtgaagccacagtggaaagcatatgatgatgtcttcagaggaaggacaaatgctgcagaaattccactgattttatatctctttgctctgatttccgtgacatggctttggggaggactacacatggcctacagacacttctggatgttggttctctttgtcattttcaacagtctgcagcttctagtaccctctgttctactttttacttctatgagatcaacattttttagcttccacacagggactctgacttcaagagagaagaaaagtacttttgtacttacatgcctactgagcccagattccaaaggccttggggttctatgtttccttaacactgaatgggctttccaagtgcat

SEQ ID NO: 363 - DNA, 3569 bp, Homo sapiens
agcggccggggccacgatggagcgcgacggctgcgcggggggcgggagccgcggcggcgagggcgggcgcgctccccgggagggcccggcggggaacggccgcgatcggggccgcagccacgctgccgaggcgcccggggacccgcaggcggccgcgtccttgctggcccctatggacgtgggggaggagccgctggagaaggcggcgcgcgcccgcactgccaaggaccccaacacctataaagtactctcgctggtattgtcagtatgtgtgttaacaacaatacttggttgtatatttgggttgaaaccaagctgtgccaaagaagttaaaagttgcaaaggtcgctgtttcgagagaacatttggggaactgtcgctgtgatgctgcctgtgttgagcttgggaaactgctgtttaggattaccaggggggacgtgcataggaaccaggaacatatatgggacttgcaacaaattcaggtgtgggtgagaaaaggttgaccagaagcctctgtgcctgttcagatgactgcaaggaccaggggcgactgcctgccatccaacctacagttcctgtgtgtccaaggtgaagaaaagttggggtagaaagaacccatgtgagagccatttaatggagcccacagtgccccagcagggtttgaaacgccctccctacccctccttattttcctttggatggattcagggcagaatatttacacacttggggtggacttcttcctgttattagcaaactaaaaaaatgtggaacatatactaaaaacatgagaccggtatatccaacaaaaactttccccaatcactacagcattgtcaccggattgtatccagaatctcatggcataatcaacaataaaatgtatgatcccaaaatgaatgcttccttttcacttaaaagtaaagagaaatttaatcctgagtggtacaaaggagaaccaatttgggtcacagctaagtatcaaggcctcaagtctggcacatttttctggccaggatcagatgtggaaattaacggaattttcccagacatctataaaatgtataatggttcagtaccatttgaagaaaggattttagctgttcttcagtggctacagcttcctaaagatgaaagaccacacttttacactctgtatttagaagaaccagattcttcaggtcattcatatggaccagtcagcagtgaagtcatcaaagccttgcagagggttgatggtatggttggtatgctgatggatggtctgaaagagctgaacttgcacagatgcctgaacctcatccttatttcagatcatggcatggaacaaggcagttgtaagaaatacatatatctgaataaatatttgggggatgttaaaaatattaaagttatctatggacctgcagctcgattgagaccctctgatgtcccagataaatactattcatttaactatgaaggcattgcccgaaatctttcttgccgggaaccaaaccagcacttcaaaccttacctgaaacatttcttacctaagcgtttgcactttgctaagagtgatagaattgagcccttgacattctatttggaccctcagtggcaacttgcattgaatccctcagaaaggaaatattgtggaagtggatttcatggctctgacaatgtattttcaaatatgcaagccctctttgttggctatggacctggattcaagcatggcattgaggctgacacctttgaaaacattgaagtctataacttaatgtgtgatttactgaatttgacaccggctcctaataacggaactcatggaagtcttaaccaccttctaaagaatcctgtttatacgccaaagcatcccaaagaagtgcaccccctggtacagtgccccttcacaagaaaccccagagataaccttggctgctcatgtaacccttcgattttgccgattgaggattttcaaacacagttcaatctgactgtggcagaagagaagattattaagcatgaaactttaccctatggaagacctagagttctccagaaggaaaacaccatctgtcttctttcccagcaccagtttatgagtggatacagccaagacatcttaatgcccctttggacatcctataccgtggacagaaatgacagtttctctacggaagacttctccaactgtctgtaccaggactttagaattcctcttagtcctgtccataaatgttcattttataaaaataacaccaaagtgagttacgggttcctctccccaccacaactaaataaaaattcaagtggaatatattctgaagctttgcttactacaaatatagtgccaatgtaccagagttttcaagttatatggcgctactttcatgacaccctactgcgaaagtatgctgaagaaagaaatggtgtcaatgtcgtcagtggtcctgtgtttgactttgattatgatggaccgttgtgattccttaagagaatctgaggcaaaaaagaagagtccatcccgtaacccaagaaaatttttggattcccaactccacttccttttattggtgctaacaagctgttaaagatacatctcagacgcctttgcactgtggaaaacctaggacaccttaggctttccattttgccttcacagggactggattaacagcgagacgtgtggtgcatggggaagcatgactcctcatggggttgaagaattcgttaaatgtttacacagagcaccggatcacaggatgttgaggcacatcacttggactcagcttctatcaacaaagaaaagagccagtttcagacattttaaagttgaaaacacatttgccaacctttagccaagaagactgatatgttttttatccccaaacaccatgaatctttttgagagaaccttatattttatatagtcctctagctacactattgcattgttcagaaactgtcgaccagagttagaacggagccctcggtgatgcggacatctcagggaaacttgcgtactcagcacagcagtggagagtgttcctgttgaatcttgcacatatttgaatgtgtaagcattgtatacattgatcaagttcgggggaataaagacagaccacacctaaaactgcctttctgcttctcttaaaggagaagtagctgtgaacattgtctggataccagatatttgaatctttcttactattggtaataaaccttgatgggcattggggcaaacagtagacttatagtagggttggggtagcccatgttatgtgactatctttatgaggaattttaaagtggttctggatatcttttaacttggagtttcatttcttttcattgtaatcaaaaaaaaaaaattaagcagaagccaaaatacttttgagaccttgtttcaatctttgctgtatatcccctcgaaaatccaagttattaatcttatgtgttttcgttttaaattttttgattgggagtttctttagattttaatggttccaaaggagttcaacttttgaggggacgatctttgaatatacttacctattataaaatcttactttgtatttgtattt

SEQ ID NO: 364 - DNA, 832 bp, Homo sapiens
tccttctatgcttattcggaggggcggcaaggcatgtttcccagtttttaagatcttgcccccccccataatttatgaggaccgttctgtgtccgggcatcagtgatggtgcccctgcatttcggggtgctctttggagggcgtgtttgttgaaaaaccacccccaaccccctgcccgccggtcccggacctggccaccatggaaggtgctgcggatggtggatccgcgtgccaggcggctccgctcccctgatgggggtgccaggctgtgactggagggggaggcagggggcacccgtggggtgcctgagctgttttctttcccatttggcaacagtgacgggcgctcagcccccgggcgttctgtgcaaacgtaggtgttcctgcgggtcatcatgctaggagggaggttgttgggggtgctcgtgctgtccttccgccgctctgggatctctgccttgttggggttgtgggcgctgctgaccatggggctgaagggggggcagccctcgactcccactccccgcggtgctgcagctcgccttccggcctggcagccgctcctccttcagctccgcctcccccgtgctcgtcgggctgcgtttggggtgcaggggtgcaggggatgggccacctgggggagggggtaccgtttagagctggcatcaccacggaaacccagaactgactctgggggatcgttggaacctgagaattcctcacgtgggttgcaatctctgtgtgggccattctgacaatatctgtcaaaattacctcaagattaccaacgcacatatactgacttagaaactccaaatcaatgacatcatgc

SEQ ID NO: 365 - DNA, 1321 bp, Homo sapiens
cacacactgcaccacagctctcccacctctgaggccgaggagttcgtctcccgcctctccacccagaactacttccgctccctgccccgaggcaccagcaacatgacctatgggaccttcaacttcctcgggggccggctgatgatccctaatacaggaatcagcctcctcatccccccagatgccataccccgagggaagatctatgagatctacctcacgctgcacaagccggaagacgtgaggttgcccctagctggctgtcagaccctgctgagtcccatcgttagctgtggaccccctgggcgtcctgcttacccggccagtcatcctggggtatggaccactgtgggggagcccagccctgacagctgggagcctgcgcctcaaaaagcagtcgtgcgagggcagctgggaggatgtgctgcacctgggcgaggaggcgccctcccacctctactactgccagctggaggccagtgcctgctacgtcttcaccgagcagctgagccgctatgccctggtgggagaggccctcagcgtggctgccgccaagcgcctcaagctgcttctgtttgcgccggtggcctgcacctccctcgagtacaacatactggtctactgcctgcatgacactcacgatgcactcaacgtagtggtgcagctggagaagcagctgcagggacagctgatccaggagccactggtactgcacttcaaggacagttaccacaacctgcgcctatccatccacgatgtgcccagctccctgtggaagagtaagctccttgtcagctaccaggagatccccttttatcacatctggaatggcacgcagcggtacttgcactgcaccttcaccctggagcgtgtcagccccagcactagtgacctggcctgcaagctgtgggtgtggcaggtggagggcgacgggcagagcttcagcatcaacttcaacatcaccaaggacacaaggtttgctgagctgctggctctggagagtgaagcgggggtcccagccctggtgggccccagtgccttcaagatccccttcctcattcggcagaagataatttccagcctggacccaccctgtaggcggggtgccgactggcggactctggcccagaaactccacctggacagccatctcagcttctttgcctccaagcccagccccacagccatgatcctcaacctgtgggaggcgcggcacttccccaacggcaacctcagccagctggctgcagcagtggctgggactgggccagcaggacggtggcttctttcacagtgttcggaggctgagtgctgaggccgg

SEQ ID NO: 366 - DNA, 777 bp, Homo sapiens
gggtccgctgcagggcaggttcagcagcaacagcagcggcgacaccagcagggaaaagtgacagtgaaatacgatcgtaaggagcttcggaagcggctggtgctggaggaatggatcgtggagcagctgggtcagctctacggctgcgaggaagaagaaatgccagaggtagaaattgacattgatgatctttttgatgcatacagtgatgaacagagagcttcaaaattacaggaagctcttgtagactgctacaaaccaacagaggaatttatcaaagagctgctttctcggataagaggcatgaggaaactgagcccctccgcagaagaagagtgtatgattctggaacagggtgaaactctcccagagatgaagaaagagtcctgggatttgtacttcatgaagacttttgtgaaagaataggtgtccttatgaacaacgtttttgttttttttttttcttttttgggggtaaaggtgggggggtctattagacatttattcaagagcgttcttttttgggttttaaaggtttttgttaatgtaatatttaaataccaaaaatatcttgactttagccacagcctacccagggtttatcaagggagggggaccctcagggaagggcccccccaggttgcgtttcctgcagggactcaaatgttaattcccttatgatcccggaaaaatagtttttttacaagaagttgggcaaaatttttttcctaaagttggacattggactcaattggcaaatttttcaacctggtatttt

SEQ ID NO: 367 - DNA, 2056 bp, Homo sapiens
aattatgttagatggccgggtgcggtggctcacgcctgtaatctcagcactttgggaggccgagatggaagacgtcatagcacggatgcaagatgaaaaaaatggaattcctattcgtacggtcaaaagctttctttccaagatacctagcgtcttctctggttcagacattgttcaatggttgataaagaacttaactatagaagatccagtggaggcgctccatttgggaacattaatggctgcccacggctacttctttccaatctcagatcatgtcctcacactcaaggatgatggcaccttttaccggtttcaaaccccctatttttggccatcaaattgttgggagccggaaaacacagattatgccgtttacctctgcaagagaacaatgcaaaacaaggcacgactggagctcgcagactatgaggctgagagcctggccaggctgcagagagcatttgcccggaagtgggagttcattttcatgcaagcagaagcacaagcaaaagtggacaagaagagagacaagattgaaaggaagatccttgacagccaagagagagcgttctgggacgtgcacaggcccgtgcctggatgtgtaaatacaactgaagtggacattaagaagtcatccagaatgagaaacccccacaaaacacggaagtctgtctatggtttacaaaatgatattagaagtcacagtcctacccacacacccacaccagaaactaaacctccaacagaagatgagttacaacaacagataaaatattggcaaatacagttagatagacatcggttaaaaatgtcaaaagtcgctgacagtctactaagttacacggaacagtatttagaatacgacccgtttcttttgccacctgacccttctaacccatggctgtccgatgacaccactttctgggaacttgaggcaagcaaagaaccgagccagcagagggtaaaacgatggggttttggcatggacgaggcattgaaagacccagttgggagagaacagttccttaaatttctagagtcagaattcagctcggaaaatttaagattctggctggcagtggaggacctgaaaaagaggcctattaaagaagtaccctcaagagttcaggaaatatggcaagagtttctggctcccggagcccccagtgctattaacttggattccaagagttatgacaaaaccacacagaacgtgaaggaacctggacgatacacatttgaagatgctcaggagcacatttacaaactgatgaaaagtgattcatacccacgttttataagatccagtgcctatcaggagcttctacaggcaaagaaaagaggggaaatctctcacgtccaagaggttaacaagccttgctcagtcttactaaacggatcatcttgtagcatgaatgcagactggagtcactgcacacactttgtagctcaatgttgtgacctggagcagaggacattagaacaagatgttgcatgagcaaaggacctaaattgttatttttgtgtgtacattccatctccaatggactcttccgtctcaatgcctccattccaaactgttgtctgctttctttctccttctactatgctggatctgtgtctcttcctttttaacaagttcaagtgaagtaaaaccttttctttttttccttctttctctctctctctctctcaaagcttcagttagacacacagttcactgaaaattcagtcagtcaaaaactggaagaactgtaaaagaaaaaagtatatatcaataagtatacatgtggcttcacatttattaaacaataaattccgcacagaaagtttcatttcaccaatgtgtcacagtcagaaacaaactcatgtcttcggtctgttgtctgtacattctccgttaatgtttctcgcatttatttttataccatatttaaagaagaaacaccttttactccaaatgtattaaagttgatcccttctctgtaaatttgtgtatgtttatattgttgttttatctttcattaaaagatgtcagaatctcaaaaaaaaa

SEQ ID NO: 368 - DNA, 460 bp, Homo sapiens
ggcacgagggactatccacgcattgtgaaccacctggaccacacctatgtcactgcgccccaagccttcatgatgttccagtactttgtgaaggtggtgcccactgtgtacatgaaggtggacggagaggtactgacgacaaatcagatctatgtgaccagacatgagaaggctgcctatgtgctgatgggcgaccaaggccttcccggagtcttcatcctctatgagctctcgcccatgatggtgaacctgacggagatacacacgttcttctctctcttcctgacaattgtgggcgctcaccataggtggcatgttctttgagcattttgtcattaattacttaacccataagtgggggcttgggttctatttcaaaaatgaaaactctttacagggtggccataggactttatatggagtgaacttttttatgtattggagtttacgggggggctct

SEQ ID NO: 369 - DNA, 2355 bp, Homo sapiens
gtccgtgtggtggaattcgcagcggcagttcgtggtgcgggcctggggctgcgcgggcccttgcggccgggcagtctttctggccttcgggctagggctgggcctcatcgaggaaaaacaggcggagagccggcgggcggtctcggcctgtcaggagatccaggcaatttttacccagaaaagcaagccggggcctgacccgttggacacgagacgcttgcagggctttcggctggaggagtatctgatagggcagtccattggtaagggctgcagtgctgctgtgtatgaagccaccatgcctacattgccccagaacctggaggtgacaaagagcaccgggttgcttccagggagaggcccaggtaccagtgcaccaggagaagggcaggagcgagctccgggggcccctgccttccccttggccatcaagatgatgtggaacatctcggcaggttcctccagcgaagccatcttgaacacaatgagccaggagctggtcccagcgagccgagtggccttggctggggagtatggagcagtcacttacagaaaatccaagagaggtcccaagcaactagcccctcaccccaacatcatccgggttctccgcgccttcacctcttccgtgccgctgctgccaggggccctggtcgactaccctgatgtgctgccctcacgcctccaccctgaaggcctgggccatggccggacgctgttcctcgttatgaagaactatccctgtaccctgcgccagtacctttgtgtgaacacacccagcccccgcctcgccgccatgatgctgctgcagctgctggaaggcgtggaccatctggttcaacagggcatcgcgcacagagacctgaaatccgacaacatccttgtggagctggacccagacggctgcccctggctggtgatcgcagattttggctgctgcctggctgatgagagcatcggcctgcagttgcccttcagcagctggtacgtggatcggggcggaaacggctgtctgatggccccagaggtgtccacggcccgtcctggccccagggcagtgattgactacagcaaggctgatgcctgggcagtgggagccatcgcctatgaaatcttcgggcttgtcaatcccttctacggccagggcaaggcccaccttgaaagccgcagctaccaagaggctcagctacctgcactgcccgagtcagtgcctccagacgtgagacagttggtgagggcactgctccagcgagaggccagcaagagaccatctgcccgagtagccgcaaatgtgcttcatctaagcctctggggtgaacatattctagccctgaagaatctgaagttagacaagatggttggctggctcctccaacaatcggccgccactttgttggccaacaggctcacagagaagtgttgtgtggaaacaaaaatgaagatgctctttctggctaacctggagtgtgaaacgctctgccaggcagccctcctcctctgctcatggagggcagccctgtgatgtccctgcatggagctggtgaattactaaaagaacttggcatcctctgtgtcgtgatggtctgtgaatggtgagggtgggagtcaggagacaagacagcgcagagagggctggttagccggaaaaggcctcgggcttggcaaatggaagaacttgagtgagagttcagtctgcagtcctgtgctcacagacatctgaaaagtgaatggccaagctggtctagtagatgaggctggactgaggaggggtaggcctgcatccacatagaggatccaggccaaggcactggctgtcagtggcagagtttggctgtgacctttgcccctaacacgaggaactcgtttgaagggggcagcgtagcatgtctgatttgccacctggatgaaggcagacatcaacatgggtcagcacgttcagttacgggagtgggaaattacatgaggcctgggcctctgcgttcccaagctgtgcgttctggaccagctactgaattattaatctcacttagcgaaagtgacggatgagcagtaagtaagtaagtgtggggatttaaacttgagggtttccctcctgactagcctctcttacaggaattgtgaaatattaaatgcaaatttacaactgcagatgacgtatgtgccttgaactgaatatttggctttaagaatgattcttatactctgaaggtgagaatattttgtgggcaggtatcaacattggggaagagatttcatgtctaactaactaactttatacatgatttttaggaagctattgcctaaatcagcgtcaacatgcagtaaaggttgtcttcaactgaaaaaaaaaaaaaa

SEQ ID NO: 370 - DNA, 1333 bp, Homo sapiens
gccaggccggcaccaggcacagacacttatgcccttgttgggagaacagagagaggctctcttgtccactgcctgtcttcggttccaactgctggttctcctagaggcctctcctcagactcgcagagctgcctgatcattgctacagaatgaactctagcccagctgggaccccaagtccacagccctccagggccaatgggaacatcaacctggggccttcagccaacccaaatgcccagcccacggacttcgacttcctcaaagtcatcggcaaagggaactacgggaaggtcctactggccaagcgcaagtctgatggggcgttctatgcagtgaaggtactacagaaaaagtccatcttaaagaagaaagagcagagccacatcatggcagagcgcagtgtgcttctgaagaacgtgcggcaccccttcctcgtgggcctgcgctactccttccagacacctgagaagctctacttcgtgctcgactatgtcaacgggggagagctcttcttccacctgcagcgggagcgccggttcctggagccccgggccaggttctacgctgctgaggtggccagcgccattggctacctgcactccctcaacatcatttacagggatctgaaaccagagaacattctcttggactgccagggacacgtggtgctgacggattttggcctctgcaaggaaggtgtagagcctgaagacaccacatccacattctgtggtacccctgagtacttggcacctgaagtgcttctggaaagagccttatgatcgagcagtggactggtggtgcttgggggcagtcctctacgagatgctccatggcctgccgcccttctacagccaagatgtatcccagatgtatgagaacattctgcaccagccgctacagatccccggaggccggacagtggccgcctgtgacctcctgcaaagccttctccacaaggaccagaggcagcggctgggctccaaagcagactttcttgagattaagaaccatgtattcttcagccccataaactgggatgacctgtaccacaagaggctaactccacccttcaacccaaatgtgacaggacctgctgacttgaagcattttgacccagagttcacccaggaagctgtgtccaagtccattggctgtacccctgacactgtggccagcagctctggggcctcaagtgcattcctgggattttcttatgcgccagaggatgatgacatcttggattgctagaagagaaggacctgtgaaactactgaggccagctggtattagtaaggaattaccttcagctgctaggaagagctgtatt

SEQ ID NO: 371 - DNA, 2457 bp, Homo sapiens
agcggccgcagaccctgaagggacaccaggagaagattcggcagcggcagtccatcctgcctcctccccagggcccggcgcccatccccttccagcaccgcggcggggattccccggaggccaagaatcgcgtgggcccgcaggtgccactcagcgagccaggtttccgccgtcgggagtcgcaggaggagccgcgggccgtgctggctcagaagatagagaaggagacgcaaatcctcaactgcgccctggacgacatcgagtggtttgtggcccggctgcagaaggcagccgaggctttcaagcagctgaaccagcggaaaaaggggaagaagaagggcaagaaggcgccagcagagggcgtcctcacactgcgggcacggccccccctctgagggcgagttcatcgactgcttccagaaaatcaagctggcgattaacttgctggcaaagctgcagaagcacatccagaaccccagcgccgcggagctcgtgcacttcctcttcgggcctctggacctgatcgtcaacacctgcagtggcccagacatcgcacgctccgtctcctgcccactgctctcccgagatgccgtggacttcctgcgcggccacctggtccctaaggagatgtcgctgtgggagtcactgggagagagctggatgcggccccgttccgagtggccgcgggagccacaggtgcccctctacgtgcccaagttccacagcggctgggagcctcctgtggatgtgctgcaggaggccccctgggaggtggaggggctggcgtctgcccccatcgaggaggtgagtccagtgagccgacagtccataagaaactcccagaagcacagccccacttcagagcccacccccccgggggatgccctaccaccagtcagctccccacatactcacaggggctaccagccaacaccagccatggccaagtacgtcaagatcctgtatgacttcacagcccgaaatgccaacgagctatcggtgctcaaggatgaggtcctagaggtgctggaggacggccggcagtggtggaagctgcgcagccgcagcggccaggcggggtacgtgccctgcaacatcctaggcgaggcgcgaccggaggacgccggcgccccgttcgagcaggccggtcagaagtactggggccccgccagcccgacccacaagctacccccaagcttcccggggaacaaagacgagctcatgcagcacatggacgaggtcaacgacgagctcatccggaaaatcagcaacatcagggcgcagccacagaggcacttccgcgtggagcgcagccagcccgtgagccagccgctcacctacgagtcgggtccggacgaggtccgcgcctggctggaagccaaggccttcagcccgcggatcgtggagaacctgggcatcctgaccgggccgcagctcttctccctcaacaaggaggagctgaagaaagtgtgcggcgaggagggcgtccgcgtgtacagccagctcaccatgcagaaggccttcctggagaagcagcaaagtgggtcggagctggaagaactcatgaacaagtttcattccatgaatcagaggaggggggaggacagctaggcccagctgccttgggctggggcctgcggaggggaagcccacccacaatgcatggagtattatttttatatgtgtatgtattttgtatcaaggacacggagggggtgtggtgctggctagaggtccctgcccctgtctggaggcacaacgcccatccttaggccaaacagtacccaaggcctcagcccacaccaagactaatctcagccaaacctgctgcttggtggtgccagccccttgtccaccttctcttgaggccacagaactccctggggctggggcctctttctctggcctcccctgtgcacctggggggtcctggcccctgtgatgctcccccatccccacccacttctacatccatccacaccccagggtgagctggagctccaggctggccaggctgaacctcgcacacacgcagagttctgctccctgaggggggcccgggaggggctccagcaggaggccgtgggtgccattcgggggaaagtgggggaacgacacacacttcacctgcaagggccgacaacgcaggggacaccgtgccggcttcagacactcccagcgcccactcttacaggcccaggactggagctttctctggccaagtttcaggccaatgatccccgcatggtgttgggggtgctggtgtgtcttggtgcctggacttgagtctcaccctacagatgagaggtggctgaggcaccagggctaagcaattaaaccagttaagtctcaaaaaaaaaaaaaagggggggccgttttaaagaacccttgggggggcccaagttaacgcgggctggcaaggtaaaagttttttccttatagggagccgtataaaac

SEQ ID NO: 372 - DNA, 1333 bp, Homo sapiens
aagcttggcacgagggtcttgtcagcagcccggccattggagcatatctttctgccagttacggagacagcctcgttgtgctggtggccacagtggtggctcttctggacatctgcttcatcttagtggctgttccagaatctctgcctgagaaaatgagaccggtttcctggggagctcagatttcttggaaacaagcagacccttttgcgtcgttgaagaaagttggaaaagattctactgtcttactaaatctgcatcaccgtgtgtctttcataccttcctgaagctgggacagtattcaagttttttttctctatctcagggcaggtcatagggtttgggatctgttaaaattgcagcattcatagctatggtaggaattctgtctattgtggctcagacggcctttcttagcatcttgatgagatcattaggaaataagaatactgtcctccttggcttgggcttccagatgctccagttagcctggtacggttttggatcacaggcctggatgatgtgggcagcagggaccgtggctgccatgtccagcatcacgtttccggcaatcagtgccctcgtctctcggaatgcagagtcagatcagcaaggagttgcccaggggatcataactggaataagaggactatgcaatggcctggggccagcactgtatggcttcatattctacatgttccatgtggaactgactgagttgggcccgaaattgaattctaacaacgttcccctgcagggagctgtcatcccaggcccgccgtttttatttggggcatgtatagtccttatgtcttttctggctgccttattcattcctgaatacagtaaagccagtggagttcaaaaacacagtaacagcagcagcggcagcctgaccaacaccccagaacggggcagtgatgaggacattgagccactactgcaagacagcagcatctgggagctctcttcatttgaggagcctgggaatcagtgcactgagctgtaaactcggcagaaagtgggattctgcatacgccatctctgagagccatggagggagccacacccctggtgacttcatggtgctggatgggagacgctagcggcatccttcagggccaagtttgataaataccaccgccatcattctgctcatcctcctcctgtttttttttttctcttacattcttttttttttcccggttaatccttaaaaccagaaaaaaattggaaaaacttctttgcaaaaagggggcaactcccagggggaacctcaaataaaaaaagcattcttttgtgaaaaaaggagggcttccttgaaaggacaaaa

SEQ ID NO: 373 - DNA, 2578 bp, Homo sapiens
atggcggcaggcctggccacgtggctgccttttgctcgggcagcagcagtgggctggctgcccctggcccagcaacccctgcccccggcaccgggggtgaaggcatctcgaggagatgaggttctggtggtgaacgtgagcggacggcgctttgagacttggaagaatacgctggaccgctacccagacaccttgctgggcagctcggagaaggaattcttctacgatgctgactcaggcgagtacttcttcgatcgcgaccctgacatgttccgccatgtgctgaacttctaccgaacggggcggctgcattgcccacggcaggagtgcatccaggccttcgacgaagagctggctttctacggcctggttcccgagctagtcggtgactgctgccttgaagagtatcgggaccgaaagaaggagaatgccgagcgcctggcagaggatgaggaggcagagcaggccggggacggcccagccctgccagcaggcagctccctgcggcagcggctctggcgggccttcgagaatccacacacgagcaccgcagccctcgttttctactatgtgaccggcttcttcatcgccgtgtcggtcatcgccaatgtggtggagaccatcccatgccgcggctctgcacgcaggtcctcaagggagcagccctgtggcgaacgcttcccacaggcctttttctgcatggacacagcctgtgtactcatattcacaggtgaatacctcctgcggctgtttgccgcccccagccgttgccgcttcctgcggagtgtcatgagcctcatcgacgtggtggccatcctgccctactacattgggcttttggtgcccaagaacgacgatgtctctggcgcctttgtcaccctgcgtgtgttccgggtgtttcgcatcttcaagttctccaggcactcacagggcttgaggattctgggctacacactcaagagctgtgcctctgagctgggctttctcctcttttccctaaccatggccatcatcatctttgccactgtcatgttttatgctgagaagggcacaaacaagaccaactttacaagcatccctgcggccttctggtataccattgtcaccatgaccacgcttggctacggagacatggtgcccagcaccattgctggcaagattttcgggtccatctgctcactcagtggcgtcttggtcattgccctgcctgtgccagtcattgtgtccaactttagccgcatctaccaccagaaccagcgggctgacaagcgccgagcacagcagaaggtgcgcttggcaaggatccgattggcaaagagtggtaccaccaatgccttcctgcagtacaagcagaatgggggccttgaggacagcggcagtggcgaggaacaggctgtttgtgtcaggaaccgttctgcctttgaacagcaacatcaccacttgctgcactgtctagagaagacaacgtgccatgagttcacagatgagctcaccttcagtgaagccctgggagccgtctcgccgggtggccgcaccagccgtagcacctctgtgtcttcccagccagtgggacccggaagcctgctgtcttcttgctgccctcgcagggccaagcgccgcgccatccgccttgccaactccactgcctcagtcagccgtggcaggcatgcaggagctggacatgctggcagggcttgcgcaggagccatgccccttcagagccgctccagccttcaatgccaagccccatgacagccttgacctgaactgcgacagcgggggacttcgtggctgccattatcagcatccctacccctcctgccaacaccccagatgagagccaaccttcctcccctggcggcggtggcagggccggcagcaccctcaggaactccagcctgggtaccccttgcctcttccccgagactgtcaagatctcatccctgtgaggggtaggcctgctgattcagagggtcctcttcatttttgggaactcctttccaaagccatatttttgggaggcagagaggggcaggcttgggcaccccttctgccccccccactgagaactatgcaatggagtttcatgaaatggtccacatagtggggaagtagccaggaaatgagaaacttcctcccaccccagacatttttcctggtgggagctgaagcactgggcttccacaggcccctggcctccttgccctagcacactgggactggccccactctcccagctggactcctgcatgctcctccccttgggctctcagatgaaggcaaagctttgatccgacatctgagctctagcctaagaaggagagttgagatttcctcctccctctggctgggatatggagctttggaggttcagagaagagaaccctcacctctgatctggcctctacgagaggtcctcatctccatctggcccaacaattcccagattctgaagcttgggaatgcaaacacaggcttcatggggctgtggccttctggcaggcgacctgccatccccagggccttgcctgagggggttcaggcttgccttttcccaacacacactcagataggcaca

SEQ ID NO: 374 - DNA, 664 bp, Homo sapiens
tgaggctggggcaagccttttaaggactggaccacgggtgggcaggataccgggggagaacccgccctgttagttggggctggggagggccgcgcaccgagactaaattgtccttccgggcagatccgctcaccaggccctggcgacctgagcatctacgacaactggatccggtacttcaaccgcagcagcccggtgtacggcctggtccccagagcaagacttcagccaggatctaccccacctaccacacagcctttgacacctttgactatgtggacaagtttttggacccgggtgaggagggagacaaggggcatcctgagaccaggacaggagaggctgaagactgagccctggccttgtcaccttgccgcaggcttcagcagccatcaggctgtggcccggacagcggggagtgtgattctccggctcagtgacagcttcttcctgcccctcaaagtcagtgactacagtgagacactccgcagcttcctgcaggcagcccagcaagatcttggggccctgctggagcagcacagcatcagcctggggcctctggtgactgcagtggagaagtttgaggcagaagctgcagccttgggccaacgcatatcaacactgcagaagggcagccctgaccccctgcaggtccggatgctca

SEQ ID NO: 375 - DNA, 1495 bp, Homo sapiens
ggaattcgaggcgggggcagcctcgccagcgggggccccgggcctggccatgcctcactgagccagcgcctgcgcctctacctcgccgacagctggaaccagtgcgacctagtggctctcacctgcttcctcctgggcgtgggctgccggctgaccccgggtttgtaccacctgggccgcactgtcctctgcatcgacttcatggttttcacggtgcggctgcttcacatcttcacggtcaacaaacagctggggcccaagatcgtcatcgtgagcaagatgatgaaggacgtgttcttcttcctcttcttcctcggcgtgtggctggtagcctatggcgtggccacggaggggctcctgaggccacgggacagtgacttcccaagtatcctgcgccgcgtcttctaccgtccctacctgcagatcttcgggcagattccccaggaggacatggacgtggccctcatggagcacagcaactgctcgtcggagcccggcttctgggcacaccctcctggggcccaggcgggcacctgcgtctcccagtatgccaactggctggtggtgctgctcctcgtcatcttcctgctcgtggccaacatcctgctggtcaacttgctcattgccatgttcagttacacattcggcaaagtacagggcaacagcgatctctactggaaggcgcagcgttaccgcctcatccgggaattccactctcggcccgcgctggccccgccctttatcgtcatctcccacttgcgcctcctgctcaggcaattgtgcaggcgaccccggagcccccagccgtcctccccggccctcgagcatttccgggtttacctttctaaggaagccgagcggaagctgctaacgtgggaatcggtgcataaggagaactttctgctggcacgcgctagggacaagcgggagagcgactccgagcgtctgaagcgcacgtcccagaaggtggacttggcactgaaacagctgggacacatccgcgagtacgaacagcgcctgaaagtgctggagcgggaggtccagcagtgtagccgcgtcctggggtgggtggccgaggccctgagccgctctgccttgctgcccccaggtgggccgccaccccctgacctgcctgggtccaaagactgagccctgctggcggacttcaaggagaagcccccacaggggattttgctcctagagtaaggctcatctgggcctcggcccccgcacctggtggccttgtccttgaggtgagccccatgtccatctgggccactgtcaggaccacctttgggagtgtcatccttacaaaccacagcatgcccggctcctcccagaaccagtcccagcctgggaggatcaaggcctggatcccgggccgttatccatctggaggctgcagggtccttggggtaacagggaccacagacccctcaccactcacagattcctcacactggggaaataaagccatttcagaggaaaaaaaaaa

SEQ ID NO: 376 - DNA, 373 bp, Homo sapiens
gcctcataaaactctgcaaatctaaggccaaaagctgtgaaaatgaccttgaaatgggcatgctgaattccaaattcaagaagactcgctaccaggctggcatgaggaattctgaaaatctgacagcaaataacactttgagcaagcccaccagataccaggcgagctgaaggaaatcaagcaagatatctccagcctgcgctatgagcttcttgaggaaaaatctcaagctactggtgagctggcagacctgattcaacaactcagcgagaagtttggaaagaacttaaacaaagaccacctgagggtgaacaagggcaaagacatttagcagcccacatcggcgtctgtgacttctaccagcattccaagg

SEQ ID NO: 377 - DNA, 2867 bp, Homo sapiens
cttcctcttctccacgcaggcttcaacaggagatttatggagaatagcagcataattgcttgctataatgaactgattcaaatagaacatggggaagttcgctcccagttcaaattacgggcctgtaattcagtgtttacagcattagatcactgtcatgaagccatagaaataacaagcgatgaccacgtgattcagtatgtcaacccagccttcgaaaggatgatgggctaccacaaaggtgagctcctgggaaaagaactcgctgatctgcccaaaagcgataagaaccgggcagaccttctcgacaccatcaatacatgcatcaagaagggaaaggagtggcagggggtttactatgccagacggaaatccggggacagcatccaacagcacgtgaagatcaccccagtgattggccaaggagggaaaattaggcattttgtctcgctcaagaaactgtgttgtaccactgacaataataagcagattcacaagattcatcgtgattcaggagataattctcagacagagcctcattcattcagatataagaacaggaggaaagagtccattgacgtgaaatcgatatcatctcgaggcagtgatgcaccaagcctgcagaatcgtcgctatccgtccatggcgaggatccactccatgaccatcgaggctcccatcacaaaggttataaatataatcaatgcagcccaagaaaacagcccagtcacagtagcggaagccttggacagagttctagagattttacggaccacagaactgtactcccctcagctgggtaccaaagatgaagatccccacaccagtgatcttgttggaggcctgatgactgacggcttgagaagactgtcaggaaacgagtatgtgtttactaagaatgtgcaccagagtcacagtcaccttgcaatgccaataaccatcaatgatgttcccccttgtatctctcaattacttgataatgaggagagttgggacttcaacatctttgaattggaagccattacgcataaaaggccattggtttatctgggcttaaaggtcttctctcggtttggagtatgtgagtttttaaactgttctgaaaccactcttcgggcctggttccaagtgatcgaagccaactaccactcttccaatgcctaccacaactccacccatgctgccgacgtcctgcacgccaccgctttctttcttggaaaggaaagagtaaagggaagcctcgatcagttggatgaggtggcagccctcattgctgccacagtccatgacgtggatcacccgggaaggaccaactctttcctcctgcaatgcaggcagtgagcttgctgtgctctacaatgacacctgctgttcctggagagtcaccacaccgccctggccttccagcctcacggtcaaggacaccaaaatgcaacattttcaagaatattgacaagggaaccattatcgaacgctgcgccaggctattattgacatggttttggcaacagagatgacaaaacactttgaacatgtgaataagtttgtgaacagcatcaacaagccaatggcagctgagattgaaggcagcgactgtgaatgcaaccctgctgggaagaacttccctgaaaaccaaatcctgatcaaacgcatgatgattaagtgtgctgacgtggccaacccatgccgccccttggacctgtgcattgaatgggctgggaggatctctgaggagtattttgcacagactgatgaagagaagagacagggactacctgtggtgatgccagtgtttgaccggaatacctgtagcatccccaagtctcagatctctttcattgactacttcataacagacatgtttgatgcttgggatgcctttgcacatctaccagccctgatgcaacatttggctgacaactacaaacactggaagacactagatgacctaaagtgcaaaagtttgaggcttccatctgacaggctaaagccaagccacagagggggcctcttgaccgacaaaggacactgtgaatcacagtagcgtaaacaagaggccttcctttctaatgacaatgacaggtattggtgaaggagctaatgtttaatatttgaccttgaatccattccaagtcccccaaatttccattccttagaaagttatgttcccatgaagaaaaatatatgttccttttgaatacttaaatgacagaacaaatacttgggcaaactccctttgctctgcctgtcatccctgtgtacccttgtcaatcccatgggggctggttcactgtaactagcaggccacagggaaggcaaagccttgggtgcctgtgagctcatctcccgggatgggtgactaagtaggcttaggctaggtgatcagctcatcctttaccataaaagtcatcattgctgtttagcttgactgttttcctcaagaacatcgatctgaaggattcataaggagcttatctgaacagatttatctaagaaaaaaaaaaaaccgacttaaaataggggaagcaactaggaccaaattacagataaactagttagcttcacagcctctatggctacatggttcttctggccgatggtatgacacctaagttagaacacagccttggctggggggtgccctctctagactggtatcagcagcctgtgtaacccctttcctgtaaaaggggttcatcttaacaaagtcatccatgatgagggaaaaagtggcatttcatttttggggaatccatgagcttcctttatttctggctcacagaggcagccacgaggcactacaccaagtattatataaaagccattaaatttgaatgcccttggacaagcttttcttaaaaaaaaaa

SEQ ID NO: 378 - DNA, 8053 bp, Homo sapiens
gctttcctttctaaagtagaagaggatgattatccctctgaagaactactagaggatgaaaacgctataaatgcaaaacggtctaaagaaaaaaaccctgggaatcagggcaggcagtttgatgttaatctgcaagtccctgacagagcagttttagggaccattcatccagatccagaaattgaagaaagcaagcaagaaactagtatgattttggatagtgaaaaaacaagtgagactgctgccaaaggggtcaacacaggaggcagggaaccaaatacaatggtggaaaaagaacgccctctggcagataagaaagcacagagaccatttgaacgaagtgacttttctgacagcataaaaattcagactccagaattaggtgaagtgtttcagaataaagattctgattatctgaagaacgacaaccctgaggaacatctgaagacctcagggcttgcaggggagcctgagggagaactctcaaaagaggaccatgagaacacagagaagtacatgggcacagaaagccaggggtctgctgctgcagaacctgaagatgactcgttccactggactccacatacaagtgtagagccagggcatagtgacaagagggaggacttacttatcataagcagcttctttaaagaacaacagtctttgcagcggttccagaagtactttaatgtccatgagctggaagccttgctacaagaaatgtcatcaaaactgaagtcagcgcagcaggagagcctgccctataatatggaaaaagtcctagataaggtcttccgtgcttctgagtcacaaattctgagcatagcagaaaaaatgcttgatactcgtgtggctgaaaatagagatctgggaatgaacgaaaataacatatttgaagaggctgcagtgcttgatgacattcaagacctcatctattttgtcaggtacaagcactccacagcagaggagacagccacactggtgatggcaccacctctagaggaaggcttgggtggagcaatggaagagatgcaaccactgcatgaagataatttctcacgagagaagacagcagaacttaatgtgcaggttcctgaagaacccacccacttggaccaacgtgtgattggggacactcatgcctcagaagtgtcacagaagccaaatactgagaaagacctggacccagggccagttacaacagaagacactcctatggatgctattgatgcaaacaagcaaccagagacagccgccgaagagccggcaagtgtcacacctttggaaaacgcaatccttctaatatattcattcatgttttatttaactaagtcgctagttgctacattgcctgatgatgttcagcctgggcctgatttttatggactgccatggaaacctgtatttatcactgccttcttgggaattgcttcgtttgccattttcttatggagaactgtccttgttgtgaaggatagagtatatcaagtcacggaacagcaaatttctgagaagttgaagactatcatgaaagaaaatacagaacttgtacaaaaattgtcaaattatgaacagaagatcaaggaatcaaagaaacatgttcaggaaaccaggaaacaaaatatgattctctctgatgaagcaattaaatataaggataaaatcaagacacttgaaaaaaatcaggaaattctggatgacacagctaaaaatcttcgtgttatgctagaatctgagagagaacagaatgtcaagaatcaggacttgatatcagaaaacaagaaatctatagagaagttaaaggatgttatttcaatgaatgcctcagaattttcagaggttcagattgcacttaatgaagctaagcttagtgaagagaaggtgaagtctgaatgccatcgggttcaagaagaaaatgctaggcttaagaagaaaaaagagcagttgcagcaggaaatcgaagactggagtaaattacatgctgagctcagtgagcaaatcaaatcatttgagaagtctcagaaagatttggaagtagctcttactcacaaggatgataatattaatgctttgactaactgcattacacagttgaatctgttagagtgtgaatctgaatctgagggtcaaaataaaggtggaaatgattcagatgaattagcaaatggagaagtgggaggtgaccggaatgagaagatgaaaaatcaaattaagcagatgatggatgtctctcggacacagactgcaatatcggtagttgaagaggatctaaagcttttacagcttaagctcaagagcctccgtgtccactaaatgtaaacctggaagaccaggtaaagaaattggaagatgaccgcaactcactacaagctgccaaagctggactggaagatgaatgcaaaaccttgaggcagaaagtggagattctgaatgagctctatcagcagaaggagatggctttgcaaaagaaactgagtcaagaagagtatgaacggcaagaaagagagcacaggctgtcagctgcagatgaaaaggcagtttcggctgcagaggaagtaaaaacttacaagcggagaattgaagaaatggaggatgaattacagaagacagagcggtcatttaaaaaccagatcgctacccatgagaagaaagctcatgaaaactggctcaaagctcgtgctgcagaaagagctatagctgaagagaaaagggaagctgccaatttaagacacaaattattagatttaacacaaaagatggcaatgctgcaagaagaacctgtgattgtaaaaccaatgccaggaaaaccaaatacacaaaaccctccacggagaggtcctctgagccagaatgggtcttttggcccatcccctgtgagtggtggagaatgctcccctccattgacagtggagccacccgtgagacctctctctgctactctcaatcgaagagatatgcctagaagtgaatttggatcattggacgggcctctacctcatcctcgatggtcagctgaggcatctgggaaaccctctccttctgatccaggatctggtacagctaccatgatgaacagcagctcaagaggctcttcccctaccagggtactcgatgaaggcaaggttaatatggctccaaaagggccccctcctttcccaggagtccctctcatgagcacccccatgggaggccctgtaccaccacccattcgatatggaccaccacctcagctctgcggaccttttgggcctcggccacttcctccaccctttggccctggtatgcgtccaccactaggcttaagagaatttgcaccaggcgttccaccaggaagacgggacctgcctctccaccctcggggatttttacctggacacgcaccatttagacctttaggttcacttggcccaagagagtactttattcctggtacccgattaccacccccaacccatggtccccaggaatacccaccaccacctgctgtaagagacttactgccgtcaggctctagagatgagcctccacctgcctctcagagcactagccaggactgttcacaggctttaaaacagagcccataaaactatgacctctgaggtttcattggaaagaaagtgtactgtgcattatccattacagtaaaggatttcattggcttcaaaatccaaaagtttattttaaaaggtttgttgttagaactaagctgccttggcagtgtgcatttttgagccaaacaattcaaaaatgtcatttcttccctaaataaaaatcaccttttaagctagagcgtccttacaactttgaaatgtgcaataaagaatacctgtgttttagctaatgtagcatatgtaattgcaaaatgatttagaatgtcatgaaaaatatgaacatttcctgtggaaatgctttaagaacatgtatttccattatcctatttttagtgtacaccagctgaatacggagcaatggtgtttataagcgtttttttaaactatctggtcacaaagactgttacgctaaaaatgtttactaaaagatcactaaactatctcccctcttgctgaagttctttgtagtaatagctcataaaaatttgtttattaatatttcccaagtgtctgttgactcattggactgttatgaggcttgtgccatttggggaacatgtaaactcaggctcccagaactgaagatggtggctggtggcacacttccggctgctcctccgtcacctgtgaactctacaagtgacgtctttttatttcaaagaagttttatttccccacttgtaatagcattccacatgcctttcctttacgatcctcattgtcctatttgagaatggttttcctgagagtgagtttaccattagtagccaagagttgtttgaccctgatgttcccattgtttttacccattccctgtagaaaaagggtgccacaacagaaaaatgaaaatgatgtgtcatggccgtaaaagtatagaaatctttaaaaattttaaaatgtacagtcccttatctatctttcccattccttgccactgatttttgaggaatataataaaaagattggaagagtataatgccatgagaaagaatgatttaggactgtgagggttataacatgccctaggtcagcaaccaagggttgaaatcagttctgttttagggggaaatggggggggcgacagatattattccaaaattaatattaattaatatttaaacgttggtgtttttatttaaaaatcagtaactaaccatctggaattgcaccatacttaaagtcttatccattactacactgtctttaaaacaatgtttctttaaatactctacaacgtttctaagaacgaacttcagacattttaattacagtaataatagcactccttttaaggagtttcagatccacactaaaactaaaatcataaaaggctgatacttttgtttgctgctaggctatattcttccattctttgaagtcctatgatgtaatatttttgaaacctagtgtatgtcttgtcactgttgtgatatttaatcgattaagaataccttgtaaaaaggagcaaaagcttcaatgtgaaacaattttctctctttatactaaacaactgaagatagatagtttagaaagataaggacctttgaaagaagacaactctgtcaaagttcataaggaatataaaaattcttcaggaaaagagaattcaatctatatgtcctcccgtttaatatcaagaatagaagaaattaagaggaaaactccacagaagagcataggccacttttagccatgtaaaaataagattaagtcacaaatacaacttttgaatttacctgtcaatatctctttaggacacaaaacaatgctgaagttaatataatttctaattttaaatgtcatttaagtgtagattatgccatctaggaaggtaagtaggaaaggtaaattaaatctatttttaaaattcaaaatattagagtatttttcccctctaaagccttttttggtgattattctgtatctgacataattgagaaactggtaagctgtaaagattccagtgtagcttctctgagaagttgtgagccagtccataactgcttcctcacatccatctgatttgcacccatttcctgcagcaaaccccccaaagcagggtgccccaatatgccagatgggccataggggagtatcatcccctcagcccaaatcaccttttcccatcctcctaaagtttccatcctattttgggaagtcatctccaactaattgtgtctggatttagttgctaaaattgtcttatttatttatgaagcagcaatattcagcctgaaagcatttctgccatagttgttgtagttatatcgccaatggctgatttttttcattggaaagtaaatttaagtaattcgtgggatgtggtatattctgtgtcaacttcaagataatcactcattttctcgttatattcaggtctgaattaaagttaagttaatcacccagtgttcaatttaagcttctttaatgttgatgaaaggtatttgtagttcatataaactatacttatgtgaaggatagcagatgcttcatataaattatcattttgatatacatatcttatggtttatgagaaaagagaaaaaataatacatcggttttgctacactttaatgggttttttttttaagggattttttttcaggtcttgtcagcaacatcaaacaaaaggtactgagtactccacagggtacagagtgctgccaagcaccttagaaaaattacatgacacggagaaaatgcgcctcttgctccttgaagagcttacagtctagggatttgacaactcacagtcttaggaactgggcaaagtaaggcaaattcttcatcccctagagctattgtggactgaatcattttagaatttggaattaatccaatcaagatgagagacaagactaaatttggctgagaattcattcaggctcgcatagtttttattaacatccgtctagtaaacagaatggacctaacagacaactgaaagtaaagactagatctcttgaagtgcaagggctacaacaacttaattgtggttacttattttaaaaagcaaacatactgaatggtatgactagggtgattacactagtttaaaaataggccaggtactgacactgcattcccctcatgcattgctcatttaaaatagtgaatattaaaatatgtgggctttacatctaacccacagaaagcccaccgcaaatgttctgtgtatcaaatatccacctcatgtgtactatgaaagttttatttatgccccattaagtcaaaagtaaattatagtaagctaatgacctgcatattttcatatggatgaatgtcagtatatctaaataggaaataaatggcgatcctatctacctatataaaaaaaatagaatatctttccagattttgcatactcctcactgtaagaagaggtatgcaggttttaaggtttcacaatcagttgtcagaaaaacagcagttatgcctgcagtatctcgttagcatctgactcaattatttttagattacattgtttagaagacattgtaaacccatctaaaactttgtaattattttgagatggttccaatgttaaccctagaatcatcatcagaaagagtaacaatgtgatgtagaagaacagctaatcgacatgactaaaaatatgctcattttcagaaaaacaatctggtcatctggaaacaatcacagctacaacctagggaacactcccatgtgggatactgatctggccaaggcacactttctaagcaggaaaactatcagatcagggtgaatttaggccacttcagaggtgctgcctataaacatccagacagaccttcttaggcagcagaactggtcccattcctctcaaagcagtttgacactaccctacccacatcaacccaaagcttgacgttaagtcaaaagagcatattggagcaaaagtgaacagatgtgtaaactctagcacattcttattgctgtattaagtctgaagatgagcacatcctacccacaacagtattgttccaggaagcagggtaggagtagtggtaaattagaaaatagactattaattgcacaattaatagaaaagtaaaaacatgtttcaaaatctacaataaacctgtatcccaaggagtcctatacgtcagtgtgatgtgctggactctgaattctgtggtacagctttgcattggactccgtccggcctactggtctgggtacggcttgcttcctgcctgttgaagggtgaatatgctacacagagctatgatggtttctactgagtggtaaaattcacagaagttccaggttcatcatgtcaggatcattccttgtgcaaagtttgatgtagatgaagataaagtggtttcttggtcaataattgcaatttctttcttttaaagtcagtgggtttcttgtatagttctattacaattggcccaggtttaatttcatccatctccatgaaagcaaaacac

SEQ ID NO: 379 - DNA, 4455 bp, Homo sapiens
agatggctgccgacagtgagcccgaatccgaggtatttgagatcacggacttcaccactgcctcggaatgggaaaggtttatttccaaagttgaagaagtcttgaatgactggaaactgattggaaactctttgggaaagccactcgaaaagggtatatttacttctggcacatgggaagagaaatcagatgaaatttcctttgctgacttcaagttctcagtcactcatcattatcttgtacaagagtccactgataaagaaggaaaggatgagttattagaggatgttgttccacaatctatgcaagatttgctgggtatgaataatgactttcctccaagagcacattgcctggtaagatggtatgggctacgtgagttcgtggtgattgcccctgctgcacacagtgacgctgttctcagcgaatctaagtgcaaccttcttctgagttctgtttctattgccttgggaaacactggctgtcaggtgccactctttgtgcaaattcaccacaaatggcgaagaatgtatgtaggagaatgtcaaggtcctggtgtacgaactgatttcgaaatggttcatcttagaaaagtgccaaatcagtacactcacttatcaggtctgctggatatcttcaaatcaaagattggatgtcctttaactccattgcctccagttagtattgctattcgatttacctatgtacttcaagattggcagcagtatttttggcctcagcaacctccagacatagatgcccttgtaggaggagaagttggaggcttggagtttggcaagttaccatttggtgcctgcgaagatcctattagtgaactccatttagctactacatggcactcatctgaccgaagggatcattgtggataatgatgtttattctgatttggatcctattcaagctccacattggtctgttagagttcgaaaagctgagaatcctcagtgtttgctaggtgattttgtcactgaattttttaaaatttgccgtcgaaaggagtcaactgatgagattcttggacgatctgcatttgaggaagaaggcaaagaaactgctgatataactcatgctttgtcaaaattgacagagccggcatcagttccaattcataaattatcagtttcaaatatggtacacactgcaaagaagaaaatccgaaaacacagaggtgtagaggagtcaccgctaaataatgatgttcttaatactattctcctgttcttattccctgatgctgtttctgagaaaccattagatggaactacttcaacagataataataatcctccatcagagagtgaagactataatctctacaatcagttcaagtctgcaccatctgacagtttaacatacaaactggctttgtgtctctgtatgatcaatttttaccatggagggttgaaaggagtggcacacctctggcaggaatttgttcttgaaatgcgtttccgatgggaaaacaactttctgattccaggattagcaagtggacccccagatctgaggtgttgtttactgcatcagaaactacagatgttaaattgttgtattgaaagaaagaaggcacgtgatgaggggaaaaagacaagtgcttcagatgtcactaatatatatccaggggatgctggaaaagcaggagaccagttggtgccagataatctaaaagaaacagataaggaaaagggagaggtaggaaaatcttgggattcctggagtgacagcgaagaagaattttttgaatgcctaagtgatactgaagaacttaaaggaaatggacaagagagtggcaagaaaggaggacctaaggagatggcaaatttaaggccggaaggacggctctatcagcatgggaaacttacactgctgcataatggagaacctctctacattccagtaacccaggaaccagcacctatgacagaagatctgctagaagagcagtctgaagttttagctaaattaggtacatcggcagagggggctcaccttcgagcacgcatgcagagtgcctgtctgctctcagatatggagtcttttaaggcagctaatccaggttgctccctggaagattttgtgaggtggtattcaccccgggattatattgaagaggaggtgattgatgaaaagggcaatgtggtgctgaaaggagaactgagtgcccggatgaagattccaagcaatatgtgggtagaagcctgggaaacagctaagccaattcctgctagaaggcaaaggagactcttcgatgatacacgggaagcagaaaaggtgctgcactatctggcaatccagaaacctgcagaccttgctcggcacctgttaccttgtgtgattcatgcagctgtactcaaggtaaaggaagaagaaagtctcgaaaacatttcttcagttaagaagatcataaagcagataatatcccattccagtaaagttttgcacttccccaatccagaagacaagaaattggaagaaatcattcaccagattactaatgtggaagctctcattgccagagctcggtcactaaaagccaagtttggaactgagaaatgtgaacaggaggaggaaaaggaagatcttgaaaggtttgtgagttgcctgctggagcagcctgaagtgttagtcaccggtgcaggaagaggacatgctggcaggatcattcacaagctgtttgtgaatgcccagagggctgcagctatgactccaccagaggaggaattgaagagaatgggctccccagaggaaagaaggcagaactccgtgtcagacttcccaccccctgctggccgggaattcattttgcgcaccactgtgccgcgccctgctccctactccaaagctctgcctcagcggatgtacagtgttctcaccaaagaggactttagacttgcaggtgccttttcatcagatacttccttcttctgattcttctagcattactcgttggtggcttcagagacagtgctgcctcctcctgagggagggaaggtaccagggagaacctgggaggtcctggagagggccctgtccagttgggtgatcaggaatcaaaccagcatcggaaagacttcccagcaccaagcttgagctgtgtcgtttcgtggagggggcagcgaggatgggcttgagctgttgagagatttctgccctagagatggcctttgtatatgggggggtggtggggggacacaaacacatcagacactccgtcctcacactggcaggacggtgttcatcgcattctcttctgtgaccagcctctaggctagcggctgcattcgtggtctgtgcaaacacttcgtggttctatatatcagcagcaagtgtgcaaaataaaggacctgttaactcagatttctggatattttggtggtagcttctagtcccagaatctgtgtttttaaaatactacatgacattctgtctattcaatcacctggtggtcatctttcttgtactaattaactgttgatgagcattttggatattctaggagaaagcctataatttcacatagtttctctttttcatgtaactgtaacctaaatgtattacttctgataaaactatatatcaaatgtcactgcaaattagttttatatctgtcatgtgagatttgtcttacttatttttcttttggttgccatggaagttatggccctgaaaatcgtctccctccccttctcttgctgtacagcatgcgttctctttttgtggttgctggctgggtactgtatttaatgaagtagagaatagcacttgcaaaaatacagtcttggtacctagagactgtcatgcagatagtataatttggtatatgtgctaatgcattgagtagaggattattttaacacactattttgcttttgtattttagttaaaataatcgatggggatgtgtagcccccccgtgtgaggatgacatcaccacatttctagtttcatggagctcaagatgtcttgtgtctgtgtggctagatggcctctgcttggtaatcttatttttaggcctaaaattcccacttaaatccaaagtaaaaatggttatactgaagcataaaccttgcctgtgtaattttaaaaaattaatagagctgtgcaaaccctgttatttttgtaaaaaaaaaaaaaatacatatctatatataatatgtgtgtgtgtgtgacatatgcacacgtctctgtgtatgtgaagtaggggaggccctgggggatgacctcccagcctttatgaatcttttctctatgctgctggacttcattcttactggtcacgcgatgcaggcggcctgaggccagtgctgtaccaagtagaagacggttcctaaggacagagtttgtctgttttctaacaaagaaaaattctacaaaggagtggttaaagttacaaaggcattgtgaatctaataaaaggaaaggtgtcgcttaaaa

SEQ ID NO: 380 - DNA, 2333 bp, Homo sapiens
ttttttttttttctattttcaatcaaatttctttttaatgaaaactaatttttaagggcaagataccacagcagaagaaaaacgtcttgcaagaaaagacttcatggtttacaacgatcaaatgtatgggctatttgcctgattggtggcctggactcagcaagagattcctttgcagcagaggttggccacacatctgggggctgcaacaccactgaaaagacagctttctaagcattagtgtaaggcaaaaagcagagtgcctaaacttggccatttccaccaagaaaaaaagtttcatagcaaccttccttcaccagaaaggcttactttatgatatgctaacagaacagaaaagcaggttgggacaagatacagactttgttgcatttagctatgacccttctctcccctctgtggatgtgggcagggtggggagaggcaggaagaggcagtagagggaaatgacatttgcactcaggcttcccgcccctacccacccctacccttcgcccagacagacgtcggatctatgctgcaccaggggtgggtcatggagtccagctaattgccaggagctgaggcgtgtacaagccatgaaaagagctgccccacggcctccccacatcactgtccttcatgcacttgcatctttaaggctgccagcttcagagctccctggacattccctggccaagtgtcatccctgtgtcaaatggatgggatgccaggtaatccttgtactccccgtcaatcagtttggcggcattgttcctggcaaaccagcagtctatctgctcttccccgttgtaaatcttcctttgcttccagaccactgggacttggtggcctttcactgttaggacggcctcaggcccctctcccacctgaaggagcagagggtgagtgaggttctggctgggccctgcagggtcttctgtgagtctggcatcctgattcaggaactgacccagcagtccgtggcagttgctggaaaggccctcgctgttggcaatgtagaaacccaggtggtgtcgctggaagggcgccggctttttgtagaggtggatgaggatgacaaaggctatggagccctggatggtgacggtgacattggcgttggcagacacggacacctccagcccccagctccccaccaccacactctggttgcaggggagcaccagtctgtccccaccatccaagatgactctgctcggtgtgatctcgagataagatctctctggcttgttgatgaggatggtgatagtgcgcaagtaagtgcgctgtttcttgtggccatttggaggggcgggtgccccaattaactctccgttcactgtgacaccagagtccctgtgatcagagaccagcctgaggatgtccccgggctgcccatcaatgttgaagcacacggtgagtctgctcagggggaaatccacaacaaagtggggatcaccatccactgatgttttagagattttaattcttggctggtatggcttcttgagcaaaggtcctggctgcgtgccagctcctcgcacgctctgcaccaccggttcgggtcccatggcagccgacatgccgtgggcctcctccaggccatccatgcgtgggaccggccccctcagcttcatggaggtgaagggagtgaggaagcggtagctcacagccagggcctgggcccgctgccgcagccgctccttctccggttcatcgtcactttgcagccaggagctcagcagctcctttgtggtgaggtagctccagagacgctcgatgtggttggtgtccccctctccatcgcctccaggcctggggcttcctgtgacatctttccctgccttctgaggccgcacaggcacatctgtcttcaggatgatgaatttcttactgttgctggcggtgacctccacgtgcaggtgatccagcttcctgtccaccagcttccccgcaatgatgatctccgagccgttgaagtagttggggaacagggtcttggtggcctgcaccactgagctggggggataatcgatgcggatgtcagagaggagcggggtcctgatttcatcgtagaacccgatgagctgcgagcctgcgtcctcctcctcgtgcacgcgccgtgtgaggccacagttctccagcgacagtttctccagcagcctgaagtccacgtcgttgccgatgccaatggtgaagatgcagacttggcctcgggcggcctctcgggtgttgttgaggatcttgagggtgtgcgtctccccgaccgtgggcttgccttccgtcaggaagacgatgagggacacgctccggtctcccgtacgcgtgggcga

SEQ ID NO: 381 - DNA, 607 bp, Homo sapiens
cctgggcgtgctcccccgggcacctactcctaagagtacccattacatatcagtttccctcaccaagctcagccccctctgccctctggtgagtctcctgagtccctttggagtccctctcttgctcccatgcagacaactggaagcaggagctgacaaaattcatcagccccgaccagctgcctgtggagtttggggggaccatgactgaccccgatggcaaccccaagtgcctgaccaagatcaactatgggggtgaggtgcccaagagctactacctgtgcaagcaggtgaggctgcagtatgagcacacgaggtccgtgggccgcggctcctccctgcaggtggagaacgagatcctgttcccgggctgtgtgctcagatgtcctgaggttttacaacacctacagcctggttcattctaaacgcatcagctacaccgtggaggtactgctcccagaccaaaccttcatggagaagatggagaaattctaggtgaacctcatggtccccacaccctcctctttgatctctgaatccacaatgagttcacagccttccctggccagaccctgttcaacctctcaggaacagggattctacaaca

SEQ ID NO: 382 - DNA, 4197 bp, Homo sapiens
gccctgctgcccctgagcacacggacccgtccgaaccgcggggcagtgtgtcctgctgctccctgctgcggggactgtcctcagggtggtcctcacctctgcttccggcccctgtgtgcaaccctaacaaggccatcttcacggtggatgccaagaccacagagatcctcgttgctaacgacaaagcttgcgggctcctggggtacagcagccaggacctgattggccagaagctcacgcagttctttctgaggtcagattctgatgtggtggaggccctcagcgaggagcacatggaggccgacggccacgctgcggtggtgtttggcacggtggtggacatcatcagccgtagtggggagaagattccagtgtctgtgtggatgaagaggatgcggcaggagcgccgcctatgctgcgtggtggtcctggagcccgtggagagggtctcgacctgggtcgctttccagagcgatggcaccgtcacgtcatgtgacagtctctttgctcatcttcacgggtacgtgtctggggaggacgtggctgggcagcatatcacagacctgatcccttctgtgcagctccctccttctggccagcacatcccaaagaatctcaagattcagaggtctgttggaagagccagggacggtaccaccttccctctgagcttaaagctgaaatcccaacccagcagcgaggaggcgaccaccggtgaggcggcccctgtgagcggctaccgggcatctgtctgggtgttctgcaccatcagtggcctcatcaccctcctgccggatgggaccatccacggcatcaaccacagcttcgcgctgacactgtttggttacggaaagacggagctcctgggcaagaatatcactttcctgattcctggtttctacagctacatggaccttgcgtacaacagctcattacagctcccagacctggccagctgcctggacgtcggcaatgagagtgggtgtggggagagaaccttggacccgtggcagggccaggacccagctgaggggggccaggatccaaggattaatgtcgtgcttgctggtggccacgttgtgccccgagatgagatccggaagctgatggaaagccaagacatcttcaccgggactcagactgagctgattgctggaggccagctcctttcctgcctctcacctcagcctgctccaggggtggacaatgtcccagaaggaagcctgccagtgcacggtgaacaggcgctgcccaaggaccagcaaatcactgccttggggagagaggaacctgtggcaatagagagccccggacaggatcttctgggagaaagcaggtctgaaccagtggatgtgaagccatttgcttcctgcgaagattctgaagctccagtcccagctgaggatgggggcagtgatgctggcatgtgtggcctgtgtcagaaggcccagctagagcggatgggagtcagtggtcccagcgggtcagacctttgggctggggctgccgtggccaagccccaggccaagggtcagctggcggggggcagcctcctgatgcactgcccttgctatgggagtgaatggggcttgtggtggcgaagccaggacttggcccccagcccctctgggatggcaggcctctcgtttgggacacctactctagatgagccgtggctgggagtggaaaacgaccgagaagagctgcagacctgcttgattaaggagcagctgtcccagttgagccttgcaggagccctggatgtcccccacgccgaactcgttccgacagagtgccaggctgtcaccgctcctgtgtcgtcctgcgatctgggaggcagagacctgtgcggtggctgcacgggcagctcctcagcctgctatgccttggccacggacctccctgggggcctggaagcagtggaggcccaggaggttgatgtgaattcgttttcctggaacctcaaggaactctttttcagtgaccagacagaccaaacgtcatcaaattgttcctgtgctacgtctgaactcagagagacaccctcttccttggcagtgggctccgatccagatgtaggcagtctccaggaacaggggtcgtgtgtcctggatgacagggagctgttactactgaccggcacctgtgttgaccttggccaaggccgacggttccgggagagctgtgtgggacatgatccaacagaaccgcttgaggtttgtttggtgtcctctgagcattatgcagcaagcgacagagaaagcccaggacacgttccttccacgttggatgctggccctgaggacacgtgcccatcagcagaggagccaaggctgaacgtccaggtcacctccacgcccgtgatcgtgatgcgcggggctgctggcctgcagcgggagatccaggagggtgcctactccgggagctgctaccatcgagatggcttacggctgagtatacagtttgaggtgaggcgggtggagctccagggccccacacctctgttctgctgctggctggtgaaagacctcctccacagccaacgcgactcagccgccaggacccgcctgttccttgccagcctgcccggctccacccactctaccgctgctgagctcaccggacccagcctggtggaagtgctcagagccagaccctggtttgaggagccccccaaggctgtggaactggaggggttggcggcctgtgagggcgagtactcccaaaagtacagtaccatgagcccgctgggcagtggggccttcggcttcgtgtggactgctgtggacaaggaaaaaaacaaggaggtggtggtgaagtttattaagaaggagaaggtcttggaggattgttggattgaggatcccaaacttgggaaagttactttagagatcgcaattctatccagggtggagcacgccaatatcatcaaggtattggatatatttgaaaaccaagggttcttccagcttgtgatggagaagcacggctccggcctagacctcttcgctttcatcgaccgccaccccaggctggatgagcccctggcgagctacatcttccgacaagtgagagcagggccagagccgtctagtgtcagcagtgggatacctgcgcttgaaggacatcatccaccgtgacatcaaggatgagaacatcgtgatcgccgaggacttcacaatcaagctgatagactttggctcggccgcctacttggaaaggggaaaattattttatactttttgtgggaccatcgagtactgtgcaccggaagttctcatggggaatccctacagagggccggagctggagatgtggtctctgggagtcactctgtacacgctggtctttgaggagaaccccttctgtgagctggaggagaccgtggaggctgccatacacccgccatacctggtgtccaaagaactcatgagccttgtgtctgggctgctgcagccagtccctgagagacgcaccaccttggagaagctggtgacagacccgtgggtaacacagcctgtgaatcttgctgactatacatgggaagaggtgtttcgagtaaacaagccagaaagtggagttctgtccgctgcgagcctggagatggggaacaggagcctgagtgatgtggcccaggctcaggagctttgtgggggccccgttccaggcgaggctcctaatggccaaggctgtttgcatcccggggatccccgtctgctgaccagctaaacaccaatttcttcctgcttttctccacttggtttggaaaatcacacagttttcaggctccatctgtttggagaaaatacattctgaagcatccccaattcaccttctaaaaactcatgtgcaggtttgataaacaccagaacagaagacagtgatgctgtattattttagatttattacatagatttggaattcacttttttcatgacctagaaaaaaacattccagtgttcaactgttttatattattaaagggcttttaatttgtgaacttctgaaggcatgagtgttttctctttctacttttgtatatgtgcatgttttgtttcctctgacttggtatatgctcatctgagtgacggatatgtgaaatttgtagaactggttagtcaaatggccagactatttcattaatttatttcctcaaatgcttttcaaattaaagcacctttgttagtaaacagttaa

SEQ ID NO: 383 - DNA, 1843 bp, Homo sapiens
ctggtattcatacagtgacagagggagtgtttttagaaatttatagctgtttctaggtgaaaacactggttgatttagctcccttggtaagagcactgagcagaaagaagttccctatcaaatgggtgtgtggagcagccctgttctccccatcccgtagagctccaggaagttaaccagggacttcagctgcgacctgcagatttctaagcccccctgttatttctctgtcttttacgggcctgtgtatttcagacttggtggtggcagtcaacggggtctggatcctcgtggagacatttatgctgaaaggtgggaacttcttctccaagcacgtgccctggagttacctcgtctttctaactatctatggggtggagctgttcctgaaggttgccggcctgggccctgtggagtacttgtcttccggatggaacttgtttgacttctccgtgacagtgttcgccttcctgggactgctggcgctggccctcaacatggagcccttctatttcatcgtggtcctgcgccccctccagctgctgaggttgtttaagttgaaggagcgctaccgcaacgtgctggacaccatgttcgagctgctgccccggatggccagcctgggcctcaccctgctcatcttttactactccttcgccatcgtgggcatggagttcttctgcgggatcgtcttccccaactgctgcaacacgagtacagtggcagatgcctaccgctggcgcaaccacaccgtgggcaacaggaccgtggtggaggaaggctactattatctcaataattttgacaacatcctcaacagctttgtgaccctgtttgagctcacagttgtcaacaactggtacatcatcatggaaggcgtcacctctcagacctcccactggagccgcctctacttcatgaccttttacattgtgaccatggtggtgatgacgatcattgtcgcctttatcctcgaggccttcgtcttccgaatgaactacagccgcaagaaccaggactcggaagttgatggtggcatcacccttgagaaggaaatctccaaagaagagctggttgccgtcctggagctctaccgggaggcacggggggcctcctcggatgtcaccaggctgctggagaccctctcccagatggagagataccagcaacattccatggtgtttctgggacggcgatcaaggaccaagagcgacctgagcctgaagatgtaccaggaggagatccaggagtggtatgaggagcatgccagggagcaagagcagcagcgacaactcagcagcagtgcagcccccgccgcccagcagcccccaggcagccgccagcgctcccagaccgttacctagcccagcgcccgaaagccgtctcttctatgcaataacacaatagtattactctactgcgatgtacggaactgcggtgtgtgtacacatactcacgtatatgcacatatttatatacaggaagaaaaaagacagacaagatggggcttggtttataaccaccttgccctgtcttccttaactccagaagccagtttggtgaggggtgggggtgcggccaccaggtctgagctcttcctactgtggaaggctccagaaggcccttcacaaggagacccctcacctggatccagtcgactgcggggcttgcccctcatgtgggctggcctccatcggccacgtccaaagctgtcactgctactgcttcaggctcacatccccccgacctgatggcgtgcccgccccctctccctgcgggccatgccacaggtttctgtgttttgctttagggacagaaccacttaggaaggaaagaactcccg

SEQ ID NO: 384 - DNA, 1459 bp, Homo sapiens
ctggcgggcgtgggaacccaggccccgccgaggcggccaggaggtgagatggcagctgggcaaaatgggcacgaagagtgggtgggcagcgcatacctgtttgtggagtcctcgctggacaaggtggtcctgtcggatgcctacgcgcacccccagcagaaggtggcagtgtacagggctctgcaggctgccttggcagagagcggcgggagcccggacgtgctgcagatgctgaagatccaccgcagcgacccgcagctgatcgtgcagctgcgattctgcgggcggcagccctgtggccgcttcctccgcgcctaccgcgagggggcgctgcgcgccgcgctgcagaggagcctggcggccgcgctcgcccagcactcggtgccgctgcaactggtatctgcgcgccggcgccgagcggctggaggctttgctggcggacgaggagcgctgtttgagttgcatcctagcccagcagcccgaccggctccgggatgaagaactggctgagctggaggatgcgctgcgaaatctgaagtgcggctcgggggcccggggtggcgacggggaggtcgcttcggcccccttgcagcccccggtgccctctctgtcggaggtgaagccgccgccgccgccgccacctgcccagacttttctgttccagggtcagcctgtagtgaatcggccgctgagcctgaaggaccaacagacgttcgcgcgctctgtgggtctcaaatggcgcaaggtggggcgctcactgcagcgaggctgccgggcgctgcgggacccggcgctggactcgctggcctacgagtacgagcgcgagggactgtacgagcaggccttccagctgctgcggcgcttcgtgcaggccgagggccgccgcgccacgctgcagcgcctggtggaggcactcgaggagaacgagctcaccagcctggcagaggacttgctgggcctgaccgatcccaatggcggcctggcctagaccaggggtgcagccagcttttggagaacctggatggccttagggttccttctgcggctattgctgaacccctgtccatccacgggaccctgaaactccacttggcctatctgctggacctgctggggcagagttgattgccttccccaggagccagaccactgggggtgcatcattggggattctgcctcaggtactttgatagagtgtggggtgggggggacctgctttggagatcagcctcaccttctcccatcccagaagcggggcttacagccagcccttacagtttcactcatgaagcaccttgatctttggtgtcctggacttcatcctgggtgctgcagatactgcagtgaagtaaaacaggaatcaatcttgcctgcccccagctcacactcagcgtgggaccccgaatgttaagcaatgataataaagtataacacggattttgatgtgagaaaaaaaaaa

SEQ ID NO: 385 - DNA, 2408 bp, Homo sapiens
  misc_feature (1)...(2408): n = a,t,c or g
ttttttttttttcgagataaacctttttatttatttatgcttctccattttgtttaaaacaacaacaacaaccaccttaatgtaactgacagcccttccccctcaccctgcctcgggctgggggtagttaatggggaaatggcccccagggtggggctgaccagaagagcccctcaaggagctcatggagcccaaatcccctgccctggggaggggacctgtagtgtgtgacgggagcctctcccgagcctctgcttgtaccatcaaagatgcccttggccaacaagggtcaggaagcatgggggagggatttcggcctcctctgtccctacccagcccaatctcacgagcagggctggggggtttaaaaagggtggagcgggtggggttggctcacacgaaggagtactggttgttaaatggcccctggggtggcccccttcctctccatcacccccctagtggtgactgctgcagctgcaccaattgggggcacccccgcgtccccaccaggacccaggcgcccttgggcctcttgagcctggggcctatggccctctcccaattcacccaccgggaccagctaaaccacggggaccagcctcttccgggacccctccacccgcccgctttctctttctcttgcctctctttggctgctgcggctgcctnttgcccgccacttcctggcgcccctcgacgcctctttcttccccaggctgtgggggatctgtccatgaagggggttcagggggctggggtgggtcatgggaggtggtcggttacacagtcactcgctccgaagggcatgagggtgcaggaggcattcggggtggcatccatctccctcgcacacccccgcatggctcccagcctgctcccggcctcacttcttgggtgcacgggcacctcctcccctgcagacctgctctgctcaccctgctgtcgctgggaggatgggacatagctgacaaggacaacatcactggagcctcccgactccaaagggatggggtgcacccggaagtgctcgagcatatcgaaaatggactggaaccacaggtgctggacccggcactgaccctcctcgttcagcgacaaacgcaggtgcttggccttgccctggaagttgaaggtgaggacgtattcaccccgccttgtctcactctggcgcaccaggaagacaccgtgggagccagtgccgccagtcagcaccaactgtgcagccttgagccgagagagcatcccgtggaaccaaggataccctgagaggggctggtccccctcaccgccctctggctcccccctggaacaggaaggaccctgtggctgtttccggagtgtccaagggagggtagggggctgagaggggatgaactgtccctgctgggggtccctcttcaatggggatgcgggggggcaactctgggggaagcagttccatcgagtcaaaatgggaggcggcaatggaggcagagctgggggagatggatgccgaggggcggtctgagaggcccccatatgccccctgcgacaggcggtcattgctctcgctgggtccaagcagcaggtcctggctgggtagactctccgagtgattcaggcaggacagctccaggctgtctgtgttctcccttgtaaggaatgaggtcccaggggccagagggagggtcatggggcggggactggtagcagggcagggtcctgggctcaggcattcttggatgtcagacacccaggccttcacatgctgggcatccactgtctccatgatatactcggatggaccttccaccttaaccacaaacgtgttctcccggtcaggcatctccagggctgtggttgtccggacgtctgtgatagaagagcaggggatgctgagtcggggccgagaggccttgggtggtacaaagaactccaggcgacttcctcctcctccttctccttcacttcgaagcagcaggcgacacttctgccactgaggctgccctcctccccctgaaggaggcccagccacccctcctccccggcccactccggctgggtcaggggctgcctcctcagcccccatgaaactcagcagctcttccctctgcaccatccctgctccatccttcaaggcgccccctccccgactgagtctcagcctctcaaaacggtgagtccatctttccccaggggacgttccatcactgaccagtcccctaccaacggtcccagccccgccagaggagttggagttgctgtttccacctaagactggggggcctgacgaggtctccaggggcccagcggaggagggagggtcaacggtcccccgccactgcaggatgccacggactgagcctcggacagagcgacccactgaacgcagggaaaagcgcttcttgagcttcggcttggaggag

SEQ ID NO: 386 - DNA, 2204 bp, Homo sapiens
ttggggaacccccagggttttcccatccccccggtgtaaaaccgcggcccaggaaatggattttgggggccccataaaaaaacttttgcgttgccagcccccggacgttaacctggatcctttaaaacggcccccccttttttttttttttctttaacaaaatttttatttaataaatggttaaaatcgcagtgccaaaaatacattgacatttagcaatttcactgaaaggaagaaactacagaatgcacggtttcagaaagctattttaagttatttacaaataaagtatctaaaactcaaaaacaggctctgtatgctatatctagtttatcccttcccgaacaaaatttctgttatttgggcaaattcttaaaccatggtttaaaccgtaatggttacaaaccacaaacacatccatccagagactgaaaccgtttctatccggtcagtggcaaaactgttgaaagggcaatagttgaagctgttgggttttatatagtgtgaactctgataaatattcctaccaggactaaaacacagcacgctttgcgggcatggctgactcacaaaggttgtaacaaacaagaactactcttcactcgacaccatggctcagaggccaccgagaagcacgagtgactgacagctcctctgcttacaaacgaatgaaacccaaagtggatgtcgttctcacagcactgaaagtgcttcaggactcacactgatccaatactaactttcttccctattttacacatatttttctactgtccagtggaaatcattttctgttttggctaaacaacaaatactagtttataacaggaatggtaaaatctgtgagaattctgctcaatttaatacaagatcactactttctttagaatggtttctgcgtgtttctacgtcaccctctgtatttttagcttccagtttcctggtaaggaataagttctccttcccagtcacactcggggtcatttacacgtttctgggatgcccttgctcgtccatggaggccaggtgcgtgcagtgactcactctgcctcttccctcttctcaggaccagtccccgaaccttctgccttgcagatcctcctgtttccgccacactctcgcgctcggaagcgagctcctggatcatacagctgcaaggctggccggtccttgtttgccagtcgctcttttctgggtgctggactgtcgtcacacctctgcgctcttcccagtctctccatggcctcccccggagccccgctgtcctggctccccttcttccctctgtcttggccaggtcctttcccccatctctgctcatcctcactccttctggaaagccgttcaggctcgtggtgagctctgtgcctcctgccgtcatccacatggtatctttgtgcttcagattcttgttcttgagatctctccacatccctgtgctctttatcactgccgctgtgtgacgtctcctggggctcctccagcgagccttccatgggcctggcttttacgactgcaccgggggcacaggattcctgcttgccacctccagtatcaatctcctctcctctttcttttggtttctctgtggttggttcctctcccttttctggtttcttaagaagcttaatccttacttctttctctgcaattttcttctgtttatctgtctctttttttttgcatctttcttcttctcttcttcttcttttttcctcttcccgcaaacgtttcttttctaactctctcctcctccgttcttctcgcttctcttctcgaattctctgcttttctaattttctatttttaatatattccaaaagaggtgtggttcttctagcaatgagctctcttgtcttcgcctccatctcccccagcagagtctcagggttggcactggtcttctcttcctccacacagtaggtttctaaaaacttcttatattctggatctttgctgtcaaggaagatatatccatcaaaacgatctctaaaaagaaggatgtcatcaggattcctaaaattaatgtatgctcttgagtagagatgaggataaagactcaggtcggcggcgaagaactcgaagtagtcgtgtgctggcagcgggcgcagctgctcctccagctgctccttggtgaggcccggaggcaggcggcggatgaccacctgcggggagcgcgcggccgttcccaccggggcacgaaa

SEQ ID NO: 387 - DNA, 798 bp, Homo sapiens
tttcgtagcaaacaggtttcacgaccactgctctctggagtcttattcctcagagtatgagcccttgaccaaggagcatggaatgcatcacctatgtttgaacaagggcgccagatgacctctgcggacccagggtttgggaagtgctgatgtggagccacaggacttgttttagggcgtgtggggcgtgtgtgtgagtgggcttctgcaggtgggcagccagcgggcacaggcgtggagagcatggtcacccatggagacaccgctcacggggactttcctttggccccacatcccgcagggtctcttcttcgatgattcctatggcttctacccaggccaggtgctcattggccctgccaagatcttctccagcgtccagtggctgtcaggtgtcaagcccgtgctcagcaccaagagcaagttccgagtggtggtggaagaggtgcaggttgtagagttgaaagttacatggattaccaagagtttctgtccagggggcacggacagcgtcagccccccacgtctgtcatcacccaggaaaacctaggcagggtgaagcgtctcggatgctttgaccatgctcagcggcagcttggggagcgctgtctgtatgtcttcccagccaaggtagagccagccaagattgcctgggaatgtccagaaaaaaactgcgcccagggggagggctctatggccaagaaggtgaagcgcctgttgaagaagcaggttgtgcggatcatgtcatgctccccagacacccagtgttcccgggaccattccatggaagacccagac

SEQ ID NO: 388 - DNA, 4530 bp, Homo sapiens
tttcgtgacagtagcccctgctcggccttcgagttccactgcctaagtggcgagtgcatccactccagctggcgctgtgatggtggccccgactgcaaggacaaatctgacgaggaaaactgcgctgtggccacctgtcgccctgacgaattccagtgctctgatggaaactgcatccatggcagccggcagtgtgaccgggaatatgactgcaaggacatgagcgatgaagttggctgcgttaatgtgacactctgcgagggacccaacaagttcaagtgtcacagcggcgaatgcatcaccctggacaaagtctgcaacatggctagagactgccgggactggtcagatgaacccatcaaagagtgcgggaccaacgaatgcttggacaacaacggcggctgttcccacgtctgcaatgaccttaagatcggctacgagtgcctgtgccccgacggcttccagctggtggcccagcgaagatgcgaagatatcgatgagtgtcaggatcccgacacctgcagccagctctgcgtgaacctggagggtggctacaagtgccagtgtgaggaaggcttccagctggacccccacacgaaggcctgcaaggctgtgggctccatcgcctacctcttcttcaccaaccggcacgaggtcaggaagatgacgctggaccggagcgagtacaccagcctcatccccaacctgaggaacgtggtcgctctggacacggaggtggccagcaatagaatctactggtctgacctgtcccagagaatgatctgcagcacccagcttgacagagcccacggcgtctcttcctatgacaccgtcatcagcagagacatccaggcccccgacgggctggctgtggactggatccacagcaacatctactggaccgactctgtcctgggcactgtctctgttgcggataccaagggcgtgaagaggaaaacgttattcagggagaacggctccaagccaagggccatcgtggtggatcctgttcatggcttcatgtactggactgactggggaactcccgccaagatcaagaaagggggcctgaatggtgtggacatctactcgctggtgactgaaaacattcagtggcccaatggcatcaccctagatctcctcagtggccgcctctactgggttgactccaaacttcactccatctcaagcatcgatgtcaatgggggcaaccggaagaccatcttggaggatgaaaagaggctggcccaccccttctccttggccgtctttgaggacaaagtattttggacagatatcatcaacgaagccattttcagtgccaaccgcctcacaggttccgatgtcaacttgttggctgaaaacctactgtccccagaggatatggtcctcttccacaacctcacccagccaagaggagtgaactggtgtgagaggaccaccctgagcaatggcggctgccagtatctgtgcctccctgccccgcagatcaacccccactcgcccaagtttacctgcgcctgcccggacggcatgctgctggccagggacatgaggagctgcctcacagagggttgaggctgcagtggccacccaggagacatccaccgtcaggctaaaggtcagctccacagccgtaaggacacagcacacaaccacccggcctgttcccgacacctcccggctgcctggggccacccctgggctcaccacggtggagatagtgacaatgtctcaccaagctctgggcgacgttgctggcaagaggaaattgagaagaagcccagtagcgtgagggctctgtccattgtcctccccatcgttgctcctcgtcttcctttgcctgggggtcttccttctatggaagaactggcggcttaagaacatcaacagcatcaactttgacaaccccgtctatcagaagaccacagaggatgaggtgcacatttgccacaaccaggacggctacagctacccctcgagacagatggtcagtctggaggatgacgtggcgtgaacatctgcctggagtcccgtccctgcccagaacccttcctgagacctcgccggccttgttttattcaaagacagagaagaccaaagcattgcctgccagagctttgttttatatatttattcatctgggaggcagaacaggcttcggacagtgcccatgcaatggcttgggttgggattttggtttcttcctttcctcgtgaaggataagagaaacaggcccggggggaccaggatgacacctccatttctctccaggaagttttgagtttctctccaccgtgacacaatcctcaaacatggaagatgaaagggcaggggatgtcaggcccagagaagcaagtggctttcaacacacaacagcagatggcaccaacgggaccccctggccctgcctcatccaccaatctctaagccaaacccctaaactcaggagtcaacgtgtttacctcttctatgcaagccttgctagacagccaggttagcctttgccctgtcacccccgaatcatgacccacccagtgtctttcgaggtgggtttgtaccttccttaagccaggaaagggattcatggcgtcggaaatgatctggctgaatccgtggtggcaccgagaccaaactcattcaccaaatgatgccacttcccagaggcagagcctgagtcactggtcacccttaatatttattaagtgcctgagacacccggttaccttggccgtgaggacacgtggcctgcacccaggtgtggctgtcaggacaccagcctggtgcccatcctcccgacccctacccacttccattcccgtggtctccttgcactttctcagttcagagttgtacactgtgtacatttggcatttgtgttattattttgcactgttttctgtcgtgtgtgttgggatgggatcccaggccagggaaagcccgtgtcaatgaatgccggggacagagaggggcaggttgaccgggacttcaaagccgtgatcgtgaatatcgagaactgccattgtcgtctttatgtccgcccacctagtgcttccacttctatgcaaatgcctccaagccattcacttccccaatcttgtcgttgatgggtatgtgtttaaaacatgcacggtgaggccgggcgcagtggctcacgcctgtaatcccagcactttgggaggccgaggcgggtggatcatgaggtcaggagatcgagaccatcctggctaacaaggtgaaaccccgtctctactaaaaatacaaaaaattagccgggcgtggtggcgggcacctgtagtcccagctactcgggaggctgaggcaggagaatggtgtgaacccgggaagcggagcttgcagtgagccgagattgcgccactgcagtccgcagtctggcctgggcgacagagcgagactccgtctcaaaaaaaaaaaccaaaaaaaacccttgcttggggcatcagcagcccttggcctctggccaggcatggcgaggctgaggtgggaggatggtttgagctcaggcatttgaggctgtcgtgagctatgattatgccactgctttccagcctgggcaacatagtaagaccccatctcttaaaaaatgaatttggccagacacaggtgcctcacgcctgtaatcccagcactttgggaggctgagctggatcacttgagttcaggagttggagaccaggcctgagcaacaaagcgagatcccatctctacaaaaaccaaaaagttaaaaatcagctgggtacggtggcacgtgcctgtgatcccagctacttgggaggctgaggcaggaggatcgcctgagcccaggaggtggaggttgcagtgagccatgatcgagccactgcactccagcctgggcaacagatgaagaccctatttcagaaatacaactataaaaaaataaataaatcctccagtctggatcgtttgacgggacttcaggttctttctgaaatcgccgtgttactgttgcactgatgtccggagagacagtgacagcctccgtcagactcccgcgtgaagatgtcacaagggattggcaattgtccccagggacaaaacactgtgtcccccccagtgcagggaaccgtgataagcctttctggtttcggagcacgtaaatgcgtccctgtacagatagtggggattttttgttatgtttgcactttgtatattggttgaaactgttatcacttatatatatatatatatatacacacatatatataaaatctatttatttttgcaaaccctggttgctgtatttgttcagtgactattctcggggccctgtgtagggggttattgcctctgaaatgcctcttctttatgtacaaagattatttgcacgaactggactgtgtgcaacgctttttgggagaatgatgtccccgttgtatgtatgagtggcttctgggagatgggtgtcactttttaaaccactgtatagaaggtttttgtagcctgaatgtcttactgtgatcaattaaatttcttaaatgaaccaaaaaa

SEQ ID NO: 389 - DNA, 2343 bp, Homo sapiens
  misc_feature (1)...(2343): n = a,t,c or g
ttttttttttttatgtggataatatttatttgtatcttatctatagaacaaatatttacagatacaaacggaatcacagcaaagttgctataaaaccatccagacctctcgatggccacttctgaaaacatccacggtgaagggcagggccaggcctggctgtggagtgggccagctgagtacctgggcgtcagccaagggaaatggttggggattatggcttcagcactctgccggagcacattcctgagcgctgacaacgtggagccctcaccgcccccacctaccccaacctcaatggggaaggaaaggggcctgagctgggcagggctgcccgggctcactatgtgcctgctccaggagtccctggcccctgtgctggcaggagcatccctgagctggaccgggaggcctctctggcctggggctgctccctgcccggcaggctgctgtttggcagctggaggtggcaagagctgctggtgctgccagggcgtgttggccaggaatgagctcccagggcagccctgaggaaagggtcttaggaagcgcctcccagctcactactaggagctggggactgtcagtgctgagtggggctggggtacaggagcacctgcctctcctttctttggcttagaagtggggaaggaagggccaggaaaagggaccaaagccgccccagccttggcccctaggccgcctggggactgtgtgtgtgctgagggggcagtgggaggtgggcagctctggagttccctgcaccctgggatccttgggctgctctcactcccggggtcccagcagggcaaggcctctgcttgggaccagtgctgctcttcctcgctgcttactccaggaggtgaaggtgacagggcggcaaggagaggtaaccacagcatggctggggacaggcgctacactgggccccggacccagcacagggatcacagtgtcggtctcgcgcacacacctctggccacatgtgcacaccacatacatccacacgcacctccctcctgtctggcgggaggctcattctctctcgcagccactcgccctctctgcctctcacatatgcggtcacagagtgaatccgagcatcttattgctgcagggggcaggggcgtcggcatcagggaaagttaatccacgaagagcgagaacagcaccattaccacgatgcccgcacagagcagaagcagctgctgcagggagcgccacgggtcctcttcttccaagaggtcagggagcacgttcaccaaggcgatgtagagaaagccgccagaggtgaagggcaggacccaggctgccgtctcctctactcccttgggggactgggtacagatggcgaagccagcgcccagtaggccccccagcgctgttgagagttgcagcttggctgcgctccatcggtcaaagccggcccggagcaggatggcaaagtcgcccacctcatgggggatctcatgcaggaggatggccatggttgtcaggagcccgatcttcttgctcacaaggaagctggcagccacagccagcccgtgggtgaagttatcgatggtgttggccagcaggttgaggtagccgctgactttgatgctccggaccacggcaccgaggccgggctctgcagccggctgggccagacagtggcctccattgagcgcggcggcagcagcagtggggtctttgttgggggcctggctggtcccctcctccttgctgtccaggaacatcttctccaacgccaggaaggtcaggatgccagcaatgacccacagccccagctgttgctgctgctgcaggctctgcccctcaccaccagggctggcgctgcacgtgtaggcccaggcttcgggcagcagatgcagaaacacattgcccaagagtccccccagggcgaagctgagcagctgcttcaggcgccaggccccagcttctgagcgcagcatggtccccatctctaggggaatgacaagcaacgggaagaccccactgagccccaccatgagggaacccaggagggagcagatccaggtgtccagccgctctccgctcagcagagccccccaggactcgctttccttgttgtccaggcgacaggccgtcgcagtcccccggctccggagggccggctgggaacccccagcccttcccaagagctccagggcaagggcagtgaggaagaggagccttgggcccgccatgccacagccagggcagggacatccaggcatgccacgtacgtgcggcggcggcggcggcgatccgggcggccccagcccgggaattcggtnncggtcgtcgtgcgtacggcttcaatnatcaaanngnggcacg

SEQ ID NO: 390 - DNA, 1325 bp, Homo sapiens
gggaaagtgagtgctggccaggctggggcggacagaacacttcgacgggctccggagcccagattcagccaggaacccacaggcaactcggcctacccccagctgaggccctttttggacccgcaggggagagatcttaaacccagcgctttggtcccacccacccgctcccacactgggaggagaccatggctccacacacagcccctgccaggcccacaggggcgggcatgggggcccacctgcctcctgcatgtgtggacagggtcctggagagtgaggagggccgcagggagtacctggcgtttcccaccagcaagagctcgggccagaaggggcggaaggagctgctgaagggcaacggccggcgcatcgactacatgctgcatgcagaggaggggctgtgcccagactggaaggccgaggtggaagaattcagttttatcacccagctgtccggcctgacggaccacctgccagtagccatgcgactgatggtgtcttcgggggaggaggaggcatagaccgtccggagcagtggggcctctgccagcccttgcagctgcagcccatccctgggccatgtcccctccatcgagtgcccggtgcttgggggaggagggcagggacagggagggagccacagtcagtgcccgggaacctggaagctgcgctgctctgcgcctctgggcctcactgtggacagaggagtcaggcccgccccaggagcctccagctgcctaaccagtgccattctttcacaacacgattttctacaaatctacagcacaaccgagtttgtaacccgtgggttagtatgaggaccgggttcgtgtactctctgtatctcctcttaagcttcgtccagggttctttatttttgtctgctgccaatgtcgtctcgcatgcctgcaccctcgcatgcacgctgcccgcatgccacgtgccacgctgtagccacagaccccttgctcgggcctcacccaaggccaaactccaaacacaatcagaaccagccaaagaagcacttcctgggcacggccaccagctctcccgcctccagtgtgggccggctcctgcagggtccgagggctgcatctctaccagccagcccagggctcttcccagggtctcgcattcaagggcaattacattttaaaaagaaaaacagaaaaaggttaatcacaaaaccaaccctcacttcacagggtctgtaagtcactcatagaactttgctcttcccgagacagggtcccttccccagctcaggcacaacagagtctggcaggctctggcaccctgggcctcctccgggagcctcccat

SEQ ID NO: 391 - DNA, 1458 bp, Homo sapiens
ttttttttttttcaggcttaaataacaaaatatatttcagatatgcacagttttaactgaggactacacaagccttcctcgggctgcaggcccgccgccctcccagtgggattcacagcccctgcggagtttgtcctcacgcacaccacacacgatcgggtataaaacacattctataaacacgttctgatgcaaactgtgtgtccataaatatatatttatgcaagttcctcccacccactgcagggccgtacagctctggggacaggaggtcacagccgactttaaaccacaggttaagtagaaggttgcaggtcaaatagaagttcccgtgtgattgcatcacccaacggcactgttctgtcatcaggaaatgctgagtgcccgccgtggccgggtgggcgcgggcggtggtcagacgctgctctggagctggctatctgtggcactgtcaggggctgaggactggctgggcagacaagtttccaggccatctgaagactccgacaggggcttgtataagaagcaggctatggcaaagaagaggacgcccagcaccttgtacaggagccccatgatgagtatgtagcggctcatggccgaattctggtacaccaagcaggagccctgctggccacactggtcctgccacagcagacaggccttgtcgatcacccagccgaaggcgatgggccccgggatgccccctagtattctaactacaatccactggattcccagggcaaaggatctctgagggtcacggacacatcgtagagttgccgttagtgcaggaatgctgctgaggaatgtaaagaaaattacaacgaatatgaaaaccagaaggaggggctttctctgacaagttgaagtgcatttccctgcagtggcatggccaaaaccagaggaaagattctgagggatacagctacagtctcggtacacctgggaagcccaacaatagctccgattacaaggggaaggcacgggggccccttcccagggtccaggggaggacaggggcggtaggcagcggctccactcaccttctggccgtccacattcgtctccgtggctgcagggcaccctgcgtggcacagtgagaagtacatgaggccgtccgagccgcacacagggctgtagtgttctggctggcagctgcaggcagcgttgcagggagccgttaggttcaggtggccttcgggcaggaggctcccgccgtagctggctgtgacgcccgccatgggcacactggggcagtgcagtgagaagacgaggatgcccagcaggctgacaacggtgcagaacaggcagaacttgatgaccgcggagccccggagcctgagcttgttcacaaagaagccgcccaggaaggtgccgccaccacccgctggcaccaccaggtacccaaacaaggtggcagcttctgaggcactcaggcgaattccaccacacgga

SEQ ID NO: 392 - DNA, 1667 bp, Homo sapiens
ttttttttttttctatgtacaaaaacattttaattgaaatacctgtataaaaaaatatgatctccagacatctcacttttgaactgaaagaacccccatctgcgatgcctgcacacaccgcattcacacaaacacaggtactgaataaattaaacgctcaggctctggccccaccccagctttcagagcccacaagcagactgtacaaagtcaataatttaaaacccaaaccctgggcacagtgcctggaagtgtcagggtcacccactccccttaagttagccactatacatgttcatcttctgacaggcggggccaggacagacgccaggcacaggaatcagggcctggggtccctggaccacagccaccccctcccctgcctccccactgtcccctggggcttgggagaggcagactgctcagaggaaataacctcaacaaataaattaaacaataaatagccccggtgggccgagggcacctccagggggtcacaccataaataacagagttggcggcgggtacggctcgcgtgggcgggcgggcgcggaggccaggacttgcattgtgtgtgcaggacgtgcccagacgcacaccgcaggactgagggcgggaggtgggcttgggaccctgcgccggcggaaagagctccgggtgggcaggcagatgggaaggccgcctccggacacagcagcacagaggggcgtctggggttcaagtatccacccagggcaggcgggacctcgaccggagcgtctttggacagacagagcttgagaaaaccaagtcccgcgggaccagcgttcaaaaggcactcaaagcgaaggtcaccaggggtcagaggtcactgcttccgcaggaggagacggcccacgcaggaaaaagtcagggtctgggggcgtcccaggtctggccaaggcaggtggtcccctagctcccagtcaggtgcagctcctcacaagctctcgctgctggacgtggtgctggccacgtcatcagggtcgagggtgcacagccgcaggtcacagctctccggggcgcccccgtcagcccccagcatccagggatgggccgcaatctgatccagcgacggccgctctgagggccgcagggacaggcaccaccggatcagctgctggcactctggagagaccctcctccggaagagcaggcggcctcggaggatctcctcgtcctgctcgaaggggatgtccccacacaccatatcgtagagaagcacgcccagcgaccacacggtggccgagcgcccgtggtagcggtggtagcggatccactccggggggctgtacactcgggtgccgtcgaagtcggtgtagaccgtgtccttgagcagcgcacccgaaccgaagtcgatgagcttgagctctccggagcgcaggtccacaagcagattttcgtccttaatgtcgcggtgcacgaccccgcagctgtggcagtggcgcacggcggccagcacctgcgcgaagaaagcggcgcgccagcggctcgtccagggcgccgcgctccgtgataaagtcgaagatggtcctagcgccggctcgggccgctccagcaccagcaggaagccgtcgggccgctcgaaccagtccagcaggcggatgacgccgcgcgcgccgcccggcgcgcccaccttgcgcagcagc

SEQ ID NO: 393 - DNA, 1938 bp, Homo sapiens
  misc_feature (1)...(1938): n = a,t,c or g
gtggaaagaacagtcagaaagcctctcctgtggatgatgaacagctgtcagtctgtctttctggattcctagatgaggttatgaagaagtatggcagtttggttccactcagtgaaaaagaagtccttggaagattaaaagatgtctttaatgaagacttttctaatagaaaaccatttatcaatagggaaataacaaactatcgggccagacatcaaaaatgtaacttccgtatcttctataataaacacatgctggatatggacgacctggcgactctggatggtcagaactggctgaatgaccaggtcattaatatgtatggtgagctgataatggatgcagtcccagacaaagttcacttcttcaacagcttttttcatagacagctggtaaccaaaggatataatggagtaaaaagatggactaaaaaggtggatttgtttaaaaagagtcttctgttgattcctattcacctggaagtccactggtctctcattactgtgacactctctaatcgaattatttcattttatgattcccaaggcattcattttaagttttgtgtagagaatataagaaagtatttgctgactgaagccagagaaaaaaatagacctgaatcttcagggttggcagactgctgttacgaagtgtattccacaacagaaaaacgacagtgactgtggagtctttgtgctccagtactgcaagtgcctcgcccttagagcagcctttccagttttcacaagaagacatgccccgagtgcggaagaggatttacaaggagctatgtgagtgccggctcatggactgaaactcagcagggactctgggaagtctgaccaagttggagcagatggtttgttacttgaatctccaaacacttagttgaatttttacagatatttcagatcagtgggtgttggggccactattgttacctccaaattttattttttgcccttaattccatttctcccagctaccatgtactattgtttaatgttcagtttggtttcatttttaattttatggttctgtgcgtcccccatatttaatatttattattcaaacgcatgcatatagacagagcatgcagtgaagagtattaaaaaaaaaagcttagtagatttggtgcagcttttgaaacttaggttagacgtgaaactgaaatacaggtttcaaatttacttccccagaacctaaaaatgcaagatgtttttgataccaaccataacctcctgagaatagtaagtgttcccccggggcattaagggtaagcctgggggtggtttttgaccaaatcccagtccctgttttacctttacccagcggcaactttcacccaacttcccctctcccaagtgagtcttagagagtgcagtcccattcctttttgaagggtgagatggaagtggtcgtaaactgactggtgtcttctgtttctgggaggcacacttgtaaggcacagtggctgctttgggaggagtaaggtgtgagaaaaagcaaccttggaggccagtaacaatgacagatttcaatcgtggttttaggaattataatacgtggcatacatctcataaaggcttttgctgggatattgaattccctgaatttttctgttttcgacctgttaaaaaaatcttaacatccatcaaactagtggtcaaacaaatgagaatgcagctgttctcagagtaatttttaagttgtcatttccctgtgttgcctcccaattggaagaagttaaggtttaccaaatgcatttctatttcaagggtatctgaaacgtaaacattcaaaactgaaggctgactgacttnagatgttttgcaggtggctggagagaacagggaaggtaatagagacacacttagtcccatgggaagcgcagcaccgttgtaggttctttctcctgtcccattagcgacctca

SEQ ID NO: 394 - DNA, 1283 bp, Homo sapiens
  misc_feature (1)...(1283): n = a,t,c or g
gatttcagttgcctgaaagctgtaagtctgcttttttaaaagagaaattggagttaagcagacttttcattttttgatcatgaccctggaaagagaaatatatttgacatcaaaactcagcacatatccttggtctatatatacacatgaaagtttcataaaacaatacactgatattttccatgctgtattctatttcattttttaaaatgctggttgtatcccattaaactggtttcaaaataaatataacatgtacacaacaacaacaaaaaaaaacactgggttagagggccagtaagctcagcgagtatcagcaactgagacttcatccttgtctcacaaggactaaaaagagaataatgttctcattatgtggttcaatgccacacccatgtatctgagatatacatgtcacaatctgggagaagcctgtcctcaatttactttaaatacccaattctgcctagaacatgaattagacacatagtaagctcttgagtgaagtgcagatgataatgacacgatcacataccacttaaaaatatcttaacacctttacttagatctcatctcatacttgtagcatttcttcaaatttactttgaaaaaagagcttcactgtgtgtggttgtcatacacattcttctacccaaccatggacctcttttttcctctcaggcgcacttcatctaatttttttagcactggcctggcctttttggaggaggtggagtagctcttcagaaaggcttcaaacacagtttcagtgttgggatgggtactgaggaaggccttctccaggacatagaggtctactcccttatcctctggaagtgctgaaatgaaactcagcccaaagtctatgagcacaatgttcagctgttccagggggggtttcaggagcatgttggaggtggtgagatcaccatgaatgaggtcttcatcgtgcattcgagccaaaacctgcccaattgtcttggctaagttggagagaccctggggagtttttttcagtctccatagtggactgaatataatctcgaacagtcactgagccttcaatttcttccatatataagcagttggaagcatagtccacaaaaaagacaactggggcagatattccagcgcggcgacagcggaggagcgcccgggcctcctgcaccgtccgccgtctgccaagccgcgcctccagcgccgggtgccggtagccttgggaagcggtgcttnnttncnnggccttgctagccccctggctcattnnccccggcccggtctcc

SEQ ID NO: 395 - DNA, 2149 bp, Homo sapiens
acgagcctgcgttttccggccagaggacatgatgcagggggaggcacaccctagtgcttcccttattgacagaaccatcaagatgagaaaagaaacagaggctaggaaagtggtcttagcctggggactcctaaatgtatctatggctggaatgatatatactgaaatgactggaaaattgattagttcatactacaatgtgacatactggcccctctggtatattgagcttgcccttgcatctctcttcagccttaatgccttatttgatttttggagatatttcaaatatactgtggcaccaacaagtctggttgttagtcctggacagcaaacacttttagggttgaaaacagctgttgtacagactacgcctccacatgatctggcagcaacccaaatccctcccgctccaccttccccttcaattcagggtcagagtgtgttgagttatagcccttctcgttcgcccagtaccagtcccaagttcaccaccagctgtatgactggttacagccctcagctgcaaggtctgtcctcaggtggcagtggttcttatagccctggagtgacctactcgcccgtcagtggttataataagttggcgagctttagcccctctcctccttctccgtaccctaccactgttggaccagtggagagcagtggattgagatctcgctaccgttcttcacctaccgtctacaactcacctactgacaaagaagactacatgaccgacctacgaactttggatacttttctcagaagtgaagaggagaaacagcatagggttaagctggggagcccagattctacctctccttccagcagtcctactttctggaactatagtcgttctatgggggattatgcacaaactttaaagaagtttcagtatcagcttgcctgtaggtctcaggccccatgtgctaacaaagatgaagccgatctcagctctaaacaagccgcagaagaggtctgggcaagagtggctatgaatagacaacttcttgatcatatggattcatggacagctaaatttagaaattggatcaatgagacaatattagtgccacttgttcaagagattgagtctgtcagcacacagatgagacgaatgggttgtccagagctacagataggagaggctagtattactagcttgaaacaagctgccctggttaaagcgcctctcattccgactttgaacacaatcgttcagtatctagaccttactccaaatcaggaatacttgtttgaaaggatcaaagaactatctcagggaggttgtatgagctcatttcgatggaacagaggtggcgacttcaaaggacgaaagtgggatacagacctgcccaccgattctgctatcatcatgcatgtattttgcacctaccttgattccagattacctccacatccgaagtatcccgacggaaaaacttttacttctcagcactttgttcagacaccaaataaaccagatgttacaaatgagaatgttttttgcatttatcagagtgctatcaaccctccccattatgagctcatctaccagcgtcatgtatacatacctgccaaagggcagaaataatatgtttcatacattgttgatgtttctctacatcataaagaccaaagagtcaggaatgcttgggagagttaatcttggtctatctggtgtgaatatattgtggatctttggcgagtagcaagtcatatatttaattctgacatttagactatttcactgaaccagaagtcgaaactaaacatctctgagccactgactcttctgaaataaaatacacatgggtgtatgttacagactctttagatttaacagaaaatgtagctgttatgaaatgtaattgtaaaaatatgtcccgtatcttctatatcgagacattgcctttaattttatatcgcttttcagaaatttcagttgactacaaaactgcaacccttcggatttttattgactcaaaatagtgccattccccttaatgaaatagattttgagtctttttttcattgtaacccccaaatgagaatcatctacctgattcttgtaccaaaaaaaaatttttttcagtcttttttttttttaaagagggtttttgccaacccaaactggagggcaggg

SEQ ID NO: 396 - DNA, 1895 bp, Homo sapiens
actgtagaccattagtccagtgcggtggaattcatcaaccgaaacaacagtgtggtacaggtcctgcttgctgctggggctgatccaaaccttggagatgatttcagcagtgtttacaagactgccaaggaacagggaatccattctttggaagtcctgatcacccgagaggatgacttcaacaacaggctgaacaaccgcgccagtttcaagggctgcacggccttgcactatgctgttcttgctgatgactaccgcactgtcaaggagctgcttgatggaggagccaaccccctgcagaggaatgaaatgggacacacacccttggattatgcccgagaaggggaagtgatgaagcttctgaggacttctgaagccaagtaccaagagaagcagcggaagcgtgaggctgaggagcggcgccgcttccccctggagcagcgactaaaggagcacatcattggccaggagagcgccatcgccacagtgggtgctgcgatccggaggaaggagaatggctggtacgatgaagaacaccctctggtcttcctcttcttgggatcatctggaataggaaaaacagagctggccaagcagacagccaaatatatgcacaaagatgctaaaaagggcttcatcaggctggacatgtccgagttccaggagcgacacgaggtggccaagtttattgggtctccaccaggctacgttggccatgaggagggtggccagctgaccaagaagttgaagcagtgccccaatgctgtggtgctctttgatgaagtagacaaggcccatccagatgtgctcaccatcatgctgcagctgtttgatgagggccggctgacagatggaaaagggaagaccattgattgcaaggacgccatcttcatcatgacctccaatgtggccagcgacgagatcgcacagcacgcgctgcagctgaggcaggaagctttggagatgagccgtaaccgtattgccgaaaacctgggggatgtccagataagtgacaagatcaccatctcaaagaacttcaaggagaatgtgattcgccctatcctgaaagctcacttccggagggatgagtttctgggacggatcaatgagatcgtctacttcctccccttctgccactcggagctcatccaactcgtcaacaaggaactaaacttctgggccaagagagccaagcaaaggcacaacatcacgctgctctgggaccgcgaggtggcagatgtgctggtcgacggctacaatgtgcactatggcgcccgctccatcaaacatgaggtagaacgccgtgtggggaaccagctggcagcagcctatgagcaggacctgctgcccagggggctgtactttgcgcatcacggtggaggactcagacaagcagctactcaaaagcccagaactgccctcaccccaggctgagaagcgcctccccaagctgcgtctggagatcatcgacaaggacagcaagactcgcagactggacatccgggcaccactgcaccctgagaaggtgtgcaacaccatctagcagccacctgcctgctcctatgtgccctcaccatccaataaaggccccttggctgtggcatggcaaaaaaaaaaaaaagggggggccgtttaaaagaacccttggggggcccaaatttaacccgggcgggcaaggaaaaatttttttccttatggggggccgaataaaaaccaacctgggaattttgggaaagaacccttattttgggggggggacaaattgggccaacctccctacaaaaattaaaggctttagggaaaaaaaaaatttttaaggggaaaagggggaaaaacaaccggcataccctggcggttggaaagttttgtttacggagtatgatttagaaaaattt

SEQ ID NO: 397 - DNA, 2416 bp, Homo sapiens
  misc_feature (1)...(2416): n = a,t,c or g
ttttttttttttttttttcacaagttatattttattttaacacgaggattaacatatagttacaaggtcaatacaagcctccagtggaagctctttatttggtttaattccatctccagagacaaacaggcaactctaggacctttacagtggcgatcggcctccacnacagcaaaatgcctccaaagtttagaattagtgcaacacacatacgaacgttttaaaggtgctcaacatcaggttaaaatagaattctggacctttttaaaaagtttttggatgatataagcacaggaggcagagccaataagaaacatgaaaccaatatttctggaaaaacacttagcatgaacgtcactttttgacgtcgtgtaaactttcttctgcaatgacggatgttaccaaaaggcattgagacctttgcgctgcgctggttagacaagccgcaggcttatctccacggtgagcaggataaaaacccccaaggaacagcccatgacaaccttctgtgcctttttatactttcccatcctacaaaggaaaaactgggtaaaggacaagttcctccctttcattgcgtttctaagaacttttcagggcaggttcttttaaaattagtcatcttacaacacaacagtattctagcacggtggcgaagtgacaggcggcagatacgggggaggaaggagacgttcacgggaaattccacattctactctatgtgaactgctccagaaaaatacagacatgatttcacagtaggattcccagagtaaatgatgatacataggacaactgacctcctctaagaagcccggctggggcagcagtgagcttttcatggagccacgcagactggcccggaagcaacacccaggttcaacatttaagagcactcgctataacattctttttggacgcaggtggtggaaaagtttaaaaaacaggcggaggagtgacggggggatacaagcatatcctatactgggggtgacggtcattcaaagagcaaattactgcagcttatatcttttccactatgttgcaagaaatgaatctatcctgacccataatatgaaagatgcgacgcacatgcattcccgaggctctaaaatcccattttaaagaaccgtttcacatcctcgtggagtggagagtggtccacttgacttggtgaggtcagaagttcctgaagatccctgtcgtccccgttggcgggggagcccattgtggagctgtggggactgccacactcaccatgcacctgttggtttgcagggacagaggtgcggccttgactcttctcaccctgtgtcatccgggcttgtctttcgtctgtcaagtcagtcctcctgcgtgactgatgggtgcaccacgcttaggtcacccgttgcagggaccggaagtccatggctctgccgcaaccctgagcggtttgcagtcccccccggggaagaagcagtcagagaggctcacgctcacctactttaaaaacccaaagccacttcctcttcacctgcctgggcctcagcgtctctgcgcttgtggtttctcgtccccgagggctgactgagctgctccggaagggtggtgtgtggtcaaccttggttggctgagaggagcaatttcctggtttccacaagtaaagacagccccatcccttgggacctgtcctttccgtccctgtccctttggcttctataggacttccttgtcttagattcataaacagcaagaggaactgaggatgcttgaggggaccacctagttaccaaagccaagcaaagaataaagctgcccgacatcatccccaggcttccgtggcgctctcggtcacaggagctttaggccaatggttcctcttgactgtttttgccccaaatgagaggaggggctgctttgctttaaggcgtggcggcggggggggggtggtggccacagattaggggacctcaggttttcctcaaaaacccacacagggaaagaaacttggctctaaaagcaaactcaacgaattccacatgccctgaagagcacgtgataaaatacaagggtggtggcggcgggatccctcaaaggaccacgagaggcacggggtctttggtgatgaaagtgctaacctcggcggggtgcggtagctcacacctgtaatctcagcactttgggaggctgaggcgggcggatcacctgaggtcaggagtttgagaccagcctgaccaacacggtgaaaccctgtctctactaaaaatacaaacattagccgggcgtggtggtgcacgcctgtaatcacagctatttgggaggctgaggcaggagaatcgctggaacccaggaggtggaggttgtagtgagccgagatcatgccactgcactccagtctgaacaatagagcgagactcccgtctcaaaaaaaaaa

SEQ ID NO: 398 - DNA, 1495 bp, Homo sapiens
tggccatttaggaaaaattgtccttggggatcctctaaaaaatccttttgtgtccaatagcaccttaaaaaacctgggccccagataattgttgaacctcagatttaggaaggaaaatttccaagctgtcagctaaaggcagtttcccccatttcacagaatatgtggtagaagttccgagtaaggaattttttcagcagccatgaaagctccctgcataaggaagactcagtgtgcaacatctgaaagcagtattgccagagcatgactgtggcaatgaagcaaaatgttccctccacctatccctccctcccatgtataatgcttgaagggtcagtccctgaaataagtagagagaaaagtgtttgctgaaagagctaatacataagtcaaccttcactggtaccaatgaaggcttcccagttcaaaattcaacacccagaaaaggcagaaattttagctttaaattaagtttaaattttcagttatcccagtggactaggcatttaaatctgaggagttccctgagattccatatgaggaaatgaaaaacattagcttgtggattaaatttaaagagactgtaaggagaaaaacatattttatgacatgcctcttaaggactcctattatttcaatgaatttgttacagttataatatgcttgtgataaaaaggcattatttattaagaaatctaaaatgtaataatatttcaattatatagttttagagaacctttcttgcccaacacttttctgatagcaagttggacatccttgtttctgaggctataaaccatggggtttagtaatggagtgacaatcgtgtatgtcaccgtcaccagcctgtctttgttggacacatagtttgctgtaggcctcaggtagatgaaggaagcacagccataatgaacaataacaacactgaggtgagaggcgcaggtggaaaacgctttccgtctgccctcagctgagggaatcttcaggatagtcctcagaatgcagaaataagaaacacagataaacagaaagggaaccacaagtacaagaactccacaaatgaatatcacaaatccgttaacatctgtgttggtacaagccagaagaatgactgctgagatgtcacagaagtaatgattgactttgttggtgctacaaaaagggaggctgaaaactaaatttactactgtaagagaggccaagaagccaccaattgcacaggcagctgccagttttccacacacctgccagctcataagagtggggtaatgcagagggtgacaaatggcagcatagcgatcataacccatcacacccaatagcaggcagttggtaatggcaaaaccaaggaagaagaacatttgaagagcacaacagttgaaggagattgtcctggccacagaaagtagattgatgagcatcttgggtagaatgacaaaggtgtagaagtctcagatgttgagagaaagccaggaagaggccattggtgtgtgga

SEQ ID NO: 399 - DNA, 2752 bp, Homo sapiens
gcgaccgccagcggctacacggtacccgcgtgagaagctcaagtccatgacgtcccgggacaactataaggcgggcagccgggaggccgcgcgccgctgccgcagccgccgtagccgccgcagccgcagccgccgctgccgccgaaccttaccctgtgtccggggccaagcgcaagtatctggaggactcggaccccgagcgcagcgactatgaggagcagcagctgcaggaggaggaggaggcgcgcaaggtgaagagcggcatccgccagatgcgcctcttcagccaggacgagtgcgccaagatcgaggcccgcattgacgaggtggtgtcccgcgctgagaagggcctgtacaacgagcacacggtggaccgggccccactgcgcaacaagtacttcttcggcgaaggctacacttacggcgcccagctgcagaagcgcgggcccggccaggagcgcctctacccgccgggcgacgtggacgagatccccgagtgggtgcaccagctggtgatccaaaagctggtggagcaccgcgtcatccccgagggcttcgtcaacagcgccgtcatcaacgactaccagcccggcggctgcatcgtgtctcacgtggaccccatccacatcttcgagcgccccatcgtgtccgtgtccttctttagcgactctgcgctgtgcttcggctgcaagttccagttcaagcctattcgggtgtcggaaccagtgctttccctgccggtgcgcaggggaagcgtgactgtgctcagtggatatgctgctgatgaaatcactcactgcatacggcctcaggacatcaaggagcgccgagcagtcatcatcctcaggaagacaagattagatgcaccccggttggaaacaaagtccctgagcagctccgtgttaccacccagctatgcttcagatcgcctgtcaggaaacaacagggaccctgctctgaaacccaagcggtcccaccgcaaggcagaccctgatgctgcccacaggccacggatcctggagatggacaaggaagagaaccggcgctcggtgctgctgcccacacaccggcggaggggtagcttcagctctgagaactactggcgcaagtcatacgagtcctcagaggactgctctgaggcagcaggcagccctgcccgaaaggtgaagatgcggcggcactgagtctacccgccgccctcctgggaactctggctcatccttacgtagttgcccctccttttgttttgagggttttgtttttgttcattggggggtttttgttttttggtttttgttttttttgattctatatatttttccttggttttgttgcctgttaaggctgaacaatagaattggccaggacctaggttctcatattcttggtattcctcctggatggaaaggctgttggcatcaataggggacagaggctgatgctggagtggccagtagaggtggtggagcagagcacccatcttttaagtggggctgtatcaggctgggtttatttaaaagcaacaaaatgttttggttaagaaaattattttgctttcagtgtaaatcttcgcagtgttctaaacaaagttcagtcttctgcttgcccctttccctcactgatgtctgcacttggttgaggtctcctggagcctcacaggctctgctgttctccacttctcacctgccatccacgccctgcaagctcatgcaaacaccctttcttcctcctgcggcagagttgttcaggttgcctgggcaggggcttaaacagtgccagcccctgccatcccaaagctattgttaagccccccaggcgtcctccacccacgcccactagcctgccatgtccacagttccttgggctgctgaggggctagtgcagtggtcctgacctctcttatcaagagcacacttctttgctggttgctccttttgagcatatgcgtgtgattatttggaacagttagacttgccacgttgggtcagttttagaaattgtttctagctagagggactggtgtccttccaagtctagcatttggggtatggaaaattgttgtggtgtgtggtagggtttttgttttcttttttgagttttttttccccctttagtctccctggctttttcctttcccttcccttctccactggccagcttgggcctcatcctcatgtcatccttctaggaaggcgcctgccccatcttgtctgccggcagcatgcatccaaggccagagctcaggcctgcagactgggctggtgcctcctccgcttcagggtatgggagttggtgaaggggctttcaaaaaataataagaaaaaaaaggtaaagtctttggtagcttctatccactcagatcctggaaggcagcaaggttttgtggatctagattcattaggaatgtcttcttgtcagccaggccaggacccgggcttgccaagagcagaggccctcccagcaaccaggataccaccactttgggggctttgtgtacagaggtccgggtctgagacctcataggctgcagaaatctggggcagccaccatcaagaagcccctctcaggggccagaactcctttgccagcgtggatttctcaagtcgggactgcataattaaagcagttgcagttttattttttttacagcttttttcccaaaaatgatttatagttgtgtgtgcagcacttcgccctgaaatgtgtgctctacaataaacaaccaaatctaatatattttgaaaaaaaaaaa

SEQ ID NO: 400 - DNA, 2354 bp, Homo sapiens
agccctgctcatggcagtgaggtgggctcccagctgctgaggccacccagcactagtgagtgacttggcatttttatttttgttcagatcacaagaatgggcattacatcatcccacagatggctgacagatctcggcaaaagtgcatgtctcagagccttgacttatccgaattggccaaagctgctaagaagaagctgcaggcgctcagcaaccggctttttgaggaactcgccatggacgtgtatgacgaggtggatcgaagagaaaatgatgcagtgtggctggctacccaaaaccacagcactctggtgacagagcgcagtgctgtgcccttcctgcctgttaacccggaatactcagccacgcggaatcaggggcgacaaaagctggcccgctttaatgcccgagagtttgccaccttgatcatcgacattctcagtgaggccaagcggagacagcagggcaagagcctgagcagccccacagacaacctcgagctgtctctgcggagccagagtgacctcgacgaccaacacgactacgacagcgtggcctctgacgaggacacagaccaggagcccctgcgcagcaccggcgccactcggagcaaccgggcccggagcatggactcctcggacttgtctgacggggctgtgacgcctgcaggagtacctggagctgaagaaggccctggctacatcggaggcaaaggtgcagcagctcatgaaggtcaacagtagcctgagcgacgagcttccggaggctgcagcgagagcactttgcacccatagatccacaagctgcaggcggagaacctgcagctccggcagcctccagggccggtgcccacacctccactccccagtgaacgggcggaacacacacccatggcgccaggcgggagcacacaccgcagggatcgccaggccttttccatgtatgaacctggctctgccctgaagccctttgggggcccccctggggacgagctcactacgcggctgcagcctttccacagcactgagctagaggacgacgccatctattcagtgcacgtccctgctggcctttaccggatccggaaaggggtgtctgcctcagctgtgcccttcactccctcctccccgctgctgtcctgctcccaggagggaagccgccacacgagcaagctttcccgccacggcagtggagccgacagtgactatgagaacacgcaaagtggggacccactgctggggctggaagggaagaggtttctagagctgggcaaagaggaagacttccacccagagctggaaagcctggatggagacctagatcctgggcttcccagcacagaggatgtcatcttgaagacagagcaggtcaccaagaacattcaggaactgttgcgggcagcccaggagttcaagcatgacagcttcgtgccctgctcagagaagatccatttggctgtgaccgagatggcctccctcttcccaaagaggccagccctggagccagtgcggagctcactgcggctgctcaacgccagcgcctaccggctgcagagtgagtgccggaagacagtgcccccagagcccggcgccccagtggacttccagctgctgactcagcaggtgatccagtgcgcctatgacatcgccaaggctgccaagcagctggtcaccatcaccacccgagagaagaagcagtgacctctctccccacaccctcacctgcaccctaggacctcactggccataggagctgggccactccagacattaatccccaccccaacagagccactggcacaagtgcccttagtgctgccacactccctggcagccaggtgccctggtgcccacccctgtcgagcccctaaggatggggaggtgggggggcaggagcttctgtcccccacattccatgcacctcccctctgtatatagcatctcccccctcctagtgagcaggggcctgcaaggcatcactcccagcccctcgccttctagggcaccctcagcaaaggggcaggtggggacactccaagtggggcagctctccgtacatgcgccccacccccatgagccagttcagccctactgggggctgagcgggggcatcccctcctttgtacatagtctccatggatgtccctgccctgtagccaccagccccttgctgctctccctttaatgccatatggcccctgcctagggcacaggccccaacctgtgtgctggggtccccagcagcaaacactggaaagtctgttttttttttttctttcttcttccccaccccttaattttaactttgtggtaactgagtgcccccgcgtgcctgcgtgttgagtgtgtgggcgg

SEQ ID NO: 401 - DNA, 3455 bp, Homo sapiens
agatatttaagctatggttccggtcccaaacgattccccttggtagatgttcttcagtatgcattggaatttgcctcaagtaaacctgtttgcacttctcctgttgacgatattgacgctagttccccacctagtggttccataccatcacagacattaccaagcacaacagaacaacagggagccctatcttcagaactgccaagcacatcaccttcatcagttgctgccatttcatcgagatcagtaatacacaaaccatttactcagtcccggatacctccagatttgcccatgcatccggcaccaaggcacataacggaggaagaactttctgtgctggaaagttgtttacatcgctggaggacagaaatagaaaatgacaccagagatttgcaggaaagcatatccagaatccatcgaacaattgaattaatgtactctgacaaatctatgatacaagttccttatcgattacatgccgttttagttcacgaaggccaagctaatgctgggcactactgggcatatatttttgatcatcgtgaaagcagatggatgaagtacaatgatattgctgtgacaaaatcatcatgggaagagctagtgagggactcttttggtggttatagaaatgccagtgcatactgtttaatgtacataaatgataaggcacagttcctaatacaagaggagtttaataaaaactgggcagccccttgttggtatagaaacattaccaccggatttgagagattttgttgaggaagacaaccaacgatttgaaaaagaactagaagaatgggatgcacaacttgcccagaaagctttgcaggaaaagcttttagcgtctcagaaattgagagagtcagagacttctgtgacaacagcacaagcagcaggagacccaaaatatctagagcagccatcaagaagtgatttctcaaagcacttgaaagaagaaactattcaaataattaccaaggcatcacatgagcatgaagataaaagtcctgaaacagttttgcagtcggcaattaagttggaatatgcaaggttggttaagttggcccaagaagacaccccaccagaaaccgattatcgtttacatcatgtagtggtctactttatccagaaccaggcaccaaagaaaattattgagaaaacattactagaacaatttggagatagaaatttgagttttgatgaaaggtgtcacaacataatgaaagttgctcaagccaaactggaaatgataaaacctgaagaagtaaacttggaggaatatgaggagtggcatcaggattataggaaattcagggaaacaactatgtatctcataattgggctagaaaattttcaaagagaaagttatatagattccttgctgttcctcatctgtgcttatcagaataacaaagaactcttgtctaaaggcttatacagaggacatgatgaagaattgatatcacattatagaagagaatgtttgctaaaattaaatgagcaagccgcagaactcttcgaatctggagaggatcgagaagtaaacaatggtttgattatcatgaatgagtttattgtcccatttttgccattattactggtggatgaaatggaagaaaaggatatactagctgtagaagatatgagaaatcgatggtgttcctaccttggtcaagaaatggaaccacacctccaagaaaagctgacagattttttgccaaaactgcttgattgttctatggagattaaaagtttccatgagccaccgaagttaccttcatattccacgcatgaactctgtgagcgatttgcccgaatcatgttgtccctcagtcgaactcctgctgatggaagataaactgcacactttccctgaacacactgtataaactctttttagttcttaacccttgccttcctgtcacagggtttgcttgttgctgctatagtttttaacttttttttattttaataactgcaaaagacaaaatgactatacagactttagtcagactgcagacaataaagctgaaaatcgcatggcgctcagacattttaaccggaactgatgtataatcacaaatctaattgattttattatggcaaaactatgcttttgccaccttcctgttgcagtattactttgcttttatcttttctttctcaacagctttccattcagtctggatccttccatgactacagccatttaagtgttcagcactgtgtacgatacataatatttggtagcttgtaaatgaaataaagaataaagttttatttatggctacctatgtgtttgtaagcaggtatattgtatattagtgtattagtaatactagataaatgaattttgtctggggattaagattggatagttaatagattaatacaatcttttaattctgctctaatgctagcaaattggaaaatgtttaagtctttgacacttaaatttatctatatttttaacaaagttcttgaacttagtatggcaccggaacctgttttgaattcagtcaggtttttactcaagtaagtggttgattttttttaagtcaaactacactgaaacttttatccttttcttagattaatcttactttttaaatgtatttacaatatacagcaaggtgattatttcaagagaatcccaaagtacttgaataagggctattgtaaaatttaaaagaaatatttatatatacacatatatacacatacacacatgtatatatatattcttcataatggaggacaatgttttgcaatatataaatcattctatttttgtaaattgtatatcactttaattgaaaatgttctctactaattaatactgtgaaacaaaattgatgttgtttaactagaagttatgagtatcttaactgcctttattccttttcaaaaaggaaaaagctgtagaacattttgtagatgaaactactgtttaagattaatgaattaatattgtgaatgaaaatcaaaatccatactttaaaggtaatcatgttactaacaacctatttttgaattcataaaaatttctttataaatgatgttttgtgaacatagtaaaatagaccattatactatgtgtatgtttgatacagcgtcgccaaaactagtgttctttattagtgcctctcacaaaagatcctggatggaggagtaagatgaaatattatgctattatatgatgctgtttgtaaaggtattaatgtactagtaaggtgttaatgacaaggaattagtactattcctgttgtaaagttagattttgcatattgtatctatcaaaatatgtttgggtttagattttaagttgtctactgagcagatttctgcattggttttccagtcctgttaaaagtttagaaacttcatatgtgtcatcacagcttttgtaaagaaagtatccttaatattttatgacattctaccacaaa

SEQ ID NO: 402 - DNA, 1266 bp, Homo sapiens
gcacaggtctatgtccggatggactcttttgatgaggacctcgcacgacccagtggcttattggctcaggaacgcaagctttgccgagatctagtccatagcaacaaaaaggaacaggagtttcgttccattttccagcacatacaatcagctcagtctcagcgtagcccctcagaactgtttgcccaacatatgggtgcccattgttcaccatgttaaagagcatcactttgggtcctcaggaatgacattacatgaacgctttacttaaatacctaaaaagagggaactgagcaggaggcagccaaaaacaagaaaagcccagagatacacaggagaatagacatttcccccagtacattcagaaaacatggtttggctcatgatgaaatgaaaagtccccgggaacctggctacaaggatgggcataattctaaaaatgaactacaaagggttaatttttattaaatgtatcaacaacctttgtgaagtggttagaatatggtaaatgaccccaaagtctattgaggtgagcttgagaaaaaaaagagaggagttttggaacaagtgcccatgatgagagaagaaactttttgtgatatttttctgcttgtaagtattatcaaatcaactgtatacatgcactatttccaaccatgatttcagaaagacatgcatgtcagagaagagtgaaatattcatgtcttaacttaagtagactgtttttaaacagctggtccagttttttttcctaacattgtaccatatctatcatctgtcaattactgttactttaaagctaaagattactttgatggcccagctacatttgcaatgatgtgcacgtaaacactgttaagaggttaaagcttgtatacaatctgttactgtgaaataactaaattgggctttaaaaaaatcttagtatttattgatcttcattcacatatacagttgaaatttaaaataacagatggttattccaatgctgctgaaaccttttctaaaaaatacttgttttgttggttgaatgtgatgagaggcgcttctgggcagtctctcttctctcccacccgtctttcctcctccgagtaccccttctccagctttgtactagccatgtaaaacccaaggttttctttaaaacatcagaagagatctcgtcctccatgccccaaaaaagccaactcattggaggtgttacccctgggagcagtgttgcatttgtctttttgtctttttttgctctttggaggatgcagaggc

SEQ ID NO: 403 - DNA, 1006 bp, Homo sapiens
gacatacactttctgcttttcgttaatgatcaattctcttgaccataattcagggtctaattcttgaagcttttggagaactaagggaccaactggaccaagtcaaagaagacatggagaccaaatgcttcatctgtgggataggcaatgattacttcgacacagtgccacatggctttgaaacccacactttacaggagcacaacttggctaattacttgttttttctgatgtatcttataaacaaagatgaaacagaacacacaggacaggaatcttatgtctggaagatgtatcaagaaaggtgttgggaatttttcccagcaggggattgcttccggaaacagtatgaagaccagctaaattaaactcagacccaatcacctctaaaaaccaaaaccctacccctctctctccctctctcaatttctctgctctcttggaaacattttgctgattttgtgaattgccagcgttgtgtgttttctgggagcatcgaagctctgtttcggaagagctgtttcctccccccaccttttgtatttactttgagactaaagactgaagaataatctaaattcatactcagacaaaaaaaggaattctggaaagaaaaccattctggacactgtcataacacacatagatagattttcttctgagactcccggagtcttctcgagctacgagaccttcacagagacacgtggcagccacactcacccagcctctttatttcaccatcctggaaggaaactgtctgtctaatggtcacagagcactgtagcacttaacagattgccatggacaccagttgcgaagggaaatagtgccttactatatgtgggttgagctatgcagaagatacgtgcatgaaaaaacatctttattttctttatgtcgacctttcttttcttagattgattttgtgaggttttttttttttcctttagccttttctttagggggggagggtaaaaaaagcagtttgcccttaaaaaaaaaa

SEQ ID NO: 404 - DNA, 3115 bp, Homo sapiens
tttttttttacctaaaaagaaataaaatgttttactcatttacacaaatacacacactgaagtccaccctgggagctggtaaaacaatttcagtctcagacccgtctgttttccagggtcctccgagcctgggcttcctcaagagcgtggcccaagggccccacagcccagatccgggcagccccaccaccttcactgaggaggctccgaagctccgttcccgctgctccttacagacaggggaggcagatatacacaaacgcgcctcggcccagcttggggctggcgggggaggctgtgtcttcaaacctttgcccccagttgggtcagtagaaccaccagtgtcctccccttctacctcccagctccactttggaggctgaggaagcgagaggttttctaggcagatttggagccctggagattgagttcacagtgtatgttctgggggcgctggtgcagtcagcggtccagtctccagcctgcaggcgtgcacactggggtggacgatgggtggccccgcaggtgtacacatttgggtggccccggcccctataccccagtgttctctttgatccagtcccgaaacagagggagccttgtgtacacgcctggcttgttcctctgagcgcagccgtctccccagctcaccacaccggcctggaagatccgcccatccgcctccacgctggacaggggtcccccggaatcaccctggcaggagtccacgccgccgctgaggaagcccacgcacatcatgcgcggcgtgatctgctgcggcaggaggttctcgcaggtggtctggttgatgacgcggatctcacccttttgcaggatcagcgcgccagtgcctccatactgggtgtgtccccagcccgtgacccagatggccttgccggcagggaagacatgggaggcgtccggcaggcagatgggccgcaccatggagctgtactctgccggtttctccagctccagcagcgcgatgtcatagtcgaaggtgaagtcattgaagaaggggtgggagatgatgcgcttgagcctgcgctcctgcaccccaggggcgctgcgctggctctggtcgtgcaagcccaggaaggccgtccactgcgtggggtctgagtacctgaatcctctgtcatcgatgtagcagtgtgcggcagagaccagccagttgggagagatgagggaagcaccgcagatgtggccctggcccagagcatgcaggcttacctgccagggccactcgccctcatccgcatccgtgcccccaacaacacgagcctgtctcgtgaatgaccgcagcccacagtcgcagtccttctcatctgagccgtcgctacagtcctccttcccgtcacactcagggttgcccttgctcaagcagagcccattgaggcagcggtaggtgtgtttggtacaagtgacgacgttcaccttggggcaggaggcctcgtcggacccgtccccacagtcgtccttcccattgcactgctggcttttcgagaggcacttcccattggaacacctgaaggtctgggtccggacaactgcacccctgctcgtcgctgttgtctccgcagtcgttcaaactgtcgcagacccagaagaggggcttgcagaacttgttcttgcacgtgaactggtggccggcgtcgcaactgcagttgagctcatcgctgtggtcggtgcagtcggcccagccatcacagcgcagctccttccggatacaccgccccgtgcggcacgtgaactgccccgggcatgggtcactggagtcgtaggagaggtattcagctaagaagccggtgtcggtgtaggactgatctgagtggaagcgaactgtgatcttgttgctgttgctggtgacgacgaactgggacctctctccgcagtatttctccccattgatctccacgtagtccttggggcaggtgcccgcaggcacgccgggctccagcaggtagaagaatttgaagcgcaccttcacatgctggttgttgggcacctcaatgttccatgtgcagtcaatgttgggtgggtagtggcctgggtagtaggggctgttgaatgtcccctgggctttacgtaagcggcctccacagctgctcatcctaggcagctggaagaaggtggcctcaaagcccgggatgccgccgctcagtgttggttatcagtgtgatgagcaggacgttcgtgggagggagtggaaggtcaggttgtaggagggagggtaggtgccacacaactgcaccaggggcgtggggctccatggggctcatgggtgttgtacaccgtcaaccaggtgtctgccgcgctcgtcgcaggacgcaaggtcaaagctgcggaaggtgaggctcagcactgagtcggcgtccccccgcagggcccactggcagcgggcatgagcggggtaggggctgtcagggaagccgggcgtggtgaagcgcatcagctccacaccgcgggcgtgcaggccaaagctgcagctgttgtcctgggtcctctgtactgttttggagtccgtggggaaagccaccactgaggtgaccacaaaggacttcagggagcgcgcccgcgggggcagcatgactacgcgctcctcggccatgacgcgctcggcctcctccaccaggtgctgcgggatgctgaactcagaccagtagtaggcgatgacgctgccctcgctgaaggccgtcacagccgactccttgtggtaggggcccaggaatgggactccgctgtacagcagcttcagcgcgtccttcaccttgctggccaggcttacaaactcagtggagttggagttctcgtaggcatccacaaaattctcatttgtgatcctcatgtagccattgaagaccttctggacacgcacgtcccggtactgcaaatgccacaccaggaagccgatccccagcaagaccaagaggaggccgatcagcacggctgccagcaccacccagcgccccgggccatgcttttccaccttcttgacgttgttgactggcaggaactccacgccttcctccaagccattcactttctcgtgccgggagttgtacttgagtcccgcgccgaagtccttcgggccccctccgcccttgcgacgaaa

SEQ ID NO: 405 - DNA, 1264 bp, Homo sapiens
cggcacgaggaagatttaggtaatctctgggaaaacacaagatttacagactgcagttttttcgtgagaggacaagaatttaaagctcataaatctgtgcttgcagctcgatctccagtttttaacgccatgtttgaacatgaaatggaagaaagcaaaaagaatcgagtggaaataaatgatttagaccctgaagtttttaaagaaatgatgagattcatttacacagggagagcaccaaaccttgacaaaatggctgacaacttgttggcagctgcagacaaatatgcactggaacggctgaaggtcatgtgcgaaaaagctttgtgtagtaacctctcagtagagaatgttgcagatacccttgtccttgcagatttgcacagtggcagaacagttgaaagcacaagccatagactttattaataggtgcagtgtacttcgacaacttgggtgtaaagatgggaaaaactggaacagcaaccaagcaaccgacataatggaaacatcaggggggaagtccatgattcagtctcaccctcatttagtagcagaagcctttcgagcactagcatctgcacagggtccacagtttggcattccacgcaaacggctaaaacagtcctgaaatcttccatgaacagttgaaaaatggaattgactttcactcctccaggtccagaaggattctaatacacaaaccataagcaagagttgtttctgttattttgtccacagaacagaagctgaaaaagcatattgcttgcatttcaggtggataatttatggtttattcttcagctttaaattagactgattaattcacttcaaggccttaaattatcttcaatgacttctcttgttcatataatactttaatttttttttattgtgccttgtcattttgaccaaggctatgcaggattgcactagctccataatgcagtaatattgataactgaagatactaagtttcaaaaggatcttccattattttgcaaaaagaaaaatgaattttatagggtttgtcctatgctatctcaaagtttaagttctctttaaaagcacttgtattggagattaccagtaatatctccaatctaagttctataaatatgggagaaccctcttaccttcaaggtaagttatggcaatacactgcttcaattctaatttatttttcatttcagggggcaaatatgcaatgagttggcctagatttttagtgacatttatgatgtttgtcttgtatgttaactgtcca

SEQ ID NO: 406 - DNA, 2001 bp, Homo sapiens
  misc_feature (1)...(2001): n = a,t,c or g
cagcgtggcggaattcctggaaagttccaggaagactctgggtctgtggactgggctctggggccattttggggaattttccaggctgattttggctgtatgcgattttatctttctgcacagacatcagaccctgtcctcaggatgtgatggggcccctcccccatctcccatcctaccagcctgtgtccaggtgggggtggggcagggcagacaacagggtccctgtgtctcgggcagcaatgctgccccctttcctgccccaacatccccagcagacacaagagatggagactatgagctgctctcgtggctgggtctcgggggtcctgcaccctcaggagctgacgctgacgcactccactgcctgtcaccaggaacctacctcgcgccatcttcatctccatcccactggtgaccttcgtgtacacgttcaccaacattgcctacttcacggccatgtccccccaggagctgctctcctccaatgcgggggctgtgaccttcggggagaagctgctgggctacttttcttgggtcatgcctgtctccgtggctctgtcaaccttcggagggatcaatggttacctgttcacctactccaggctgtgcttctctggagcccgcgaggggcacctgcccagcctgctggccatgatccacgtcagacactgcacccccatccccgccctcctcgtctgtgcccatcaaggtgaaccttctcatccccgtggcgtacttggtcttctgggccttcctgctggtcttcagcttcatctcagagcatatggtctgtggggtcggcgtcatcatcatccttacgggggtgcccattttctttctgggagtgttctggagaagcaaaccaaagtgtgtgcacagactcacagagtccatgacacactggggccaggagctgtgtttcgtggtctacccccaggacgcccccgaagaggaggagaatggcccctgcccaccctccctgctgcctgccacagacaagccctcgaagccacaatgagatttttgtagagactgaagcagttgtttctgtttacatgttgtttattgaggaggtgttttggcaaaaaagttttgttttgtttttttctggaaaaaaaagaaaaaagatacgactctcagaagcctgttttaaggaagccctaaaatgtggactgggtttcctgtcttagcactgccctgctagctcttcctgaaaaggcctataaataaacagggctggctgttcgctcgtgctatggggagtccctgatgggcacagacgggagtggctggggcgtacctcggtgggtgcacacatgttgctggccaggaagatgccgtggcaggccctggaggaggctcttgacattagggggctttgctgcttgacacaggcgctccctaccatggcacccagagtccccctgccctaaagggatgtcgaggatggggtagcagctcagtccgcccctaccccaggcccctcgatgccagtctgagctcggccacccaggagagctcaggggctccaggctgggattgtctttcttcccgtaaatcaccacagagtgaaggtcaggacttcagagcccacagtctcaccctggcttacaggtggggaaaccgaggccctgagataggatggaacagacgtggccactgctgttggtgcctcggcctctctgtccccagaaagcacagagcagcatgtcctgggggctttgaggcctgcagggaactccaggggcttcatgtacagcaggcacacaccccagcccttccacggtgcccaggagattggaccttcagggagggcaaagggcgcctgcctggccaggggcatgagggtttggcaggagccacccaacccaggtcctccagaggccttgctggacaggaagagggtgaggcgtgagcaaaatagtcaccacggatgagacccagcgtcccgaattcctccacatggactagtgatgtcgaacaaannnnnttgtccta

SEQ ID NO: 407 - DNA, 1652 bp, Homo sapiens
tgcggccgccctcgtggctgagtacctcgccctgctcgaggaccaccgccacctgcccgtgggctgcgtttccttccagaacatctcatccaatgtgctagaggagtccgccatctccgacgacatcctgtcgcccgacgaggagggcttctgctccgggaagcacttcactgagctggggctggtagggttgctggaacaggcagccggctacttcaccatgggcgggctctacgaggcggtgaatgaggtctacaagaacctcatccccatcctggaagcccaccgtgactacaagaagctggccgcggtgcacggcaaactgcaggaggccttcaccaagatcatgcaccagagttccggctgggagcgcgtgttcgggacgtatttccgcgtgggcttctacggcgcccacttcggtgacctggatgagcaggagtttgtgtacaaggagccatcgatcacgaagctggcagagatctcacaccggctggaggagttctacacggagagatttggcgacgacgtcgttgagattatcaaagactctaaccctgtggacaagtccaagcttgactcacaaaaggcctacatccagatcacgtatgtggaaccgtactttgatacctacgagctcaaggaccgggtgacctactttgaccgcaactatgggcttcgcacattcctgttctgcacgccgttcacgccggatgggcgcgcacacggggagctgcccgagcaacacaagcgtaagacgctgctcagcaccgaccacgccttcccctacatcaagactcgcatccgtgtgtgccaccgggaggagacggtgctgacgcccagtggaggtggccatcgaggacatgcagaagaagacacgggagctggcctttgccaccgagcaggacccaccagatgctaagatgctacagatggtgcttcagggctctgtagggcccaccgtgaaccagggtcccctggaggtggcccaggtgtttttagcagagatcccggaagaccccaagctcttccggcatcacaacaaattgcggctctgcttcaaggacttctgcaaagaaatgtgaggatgcgctgcggaaaaataaggccctgattgggccggaccagaaggagtaccaccgtgagctggagcgcaactactgccgcctgcgggaggctctgcagcccctgcttacccagcgcctgccccagctgatggcacccaccccacccggcctcaggaactccttgaacagagcaagtttccgaaaggcagacctctgagcccacaaggaccaaagctgtacctagaggaaccagcacccgggcctcagctgtctgtgctgcgaggggagtctgccctggtgcccactgggctgtggggtgaccacactgtacttggggctgggccctctgcccctgtgtccccatctgtgtgcactgatgcttcctcccttttttaatttaaaatggtttttataagcaaaaaaaaaaaaaagggggggcccttttaaaggaaccaattttaacgcccgggggttgggaaggaaaaatttttttaagggggccccaaaattaaattccggggccggggtttaaaaacggggggaggggaaaaacccgggggttacccaatttaatccccttgggaaaag

SEQ ID NO: 408 - DNA, 668 bp, Homo sapiens
ggcccacagatgaccccctacctctgacatttgataaagctgggggtgacctagggcgaggggcagcagtggcagtccacgcccctctctccactgcagcccaccgttgcagatttccttaacctggcctggtggacctctgctgccgcctggtgagtcctgagcgggaggtgggtagagaaggtgctccctggccgggagggctcagaagagaagtagggcatggcatcgtcctctgctgaccacctgcactcggctccccgtgcgctgcaggtccctgttccagcagcttctctacggcctcatctaccacagctggttccaagcaggtaggtagggctttggaggcgcctcctcaagtccgggtccccaatctgagctaagacgactccatggggagggtggggtctacgactgagggaggccggagaccttgccagggtctgtgggcggagctgaggcgctctgggccctcgcagaccccgcggaggccgaggggagccccgagacgcgcgagagcagctgcgtcatgaaacagacccagtactacttcggctcggtaaacgcctcctacaacgccatcatcgactgcggaaactgctccaggtgctggcagtggggcgggaccagaggccaagggcggaacctgtgagcggcctcatgccgaa

SEQ ID NO: 409 - DNA, 1854 bp, Homo sapiens
gagagctagcaccatagcttcaataccctgattgaatgtcacccttgactgcctaactcatctctttcccaagtcataggttatccctggtcctggctgattatcacaggcagggagggagggaaagaggcaaagggagaaggccctgtgtgggactcaaacttgctcaccccttttctgtaatctgcagctcactcttgctgccactcagcagatctggtctccctaactcttttttcccctgcctctactttgagactcaattgcttccccaggactttttttctccccaagccaaagaatgaaagttcaatcatcccagctcagttcttatcaagcattccagctagcctatgccagagatgttacacagctctttaataatagtggccatagctgtaataacaatgacaacagtaggtagcggtagtcataccaacagtagggcagtgcattttatattacaactggtttcttgctctagtaggcttggggatgggtgaagacggacagggctggcgcagaccctttccttctcctctccagcccacagtgatgtgggcttttgcaagacagcctgcttccattcagtagtgtgggaaaagttcctttttggcttaacaatacccctgagaccttgttcagtgggctgtgtctctccctgggatgctgggagcaccaagtgtggcccgagctagggctgctgacttcctctgggcgcctctgggctgcgagggtctcttacaggaattgaggccctttgctgctccaagaaatgctgaggctgtgggcagaggggtgtacccaaggggactcttgctctgtgtctgactttgggggatccccaggtgggcagggcaggaaggaagcggctcccagcactgcaaaggggcagcagcattacagctcagccttccagacattgtagatccagttgagataggctgagaccttggtgtatactcctggggtgctcgggcccccgcagccatagccccagctaacgatgcccaccacatgccactggtcagattggtacatcaggggcccaccactgtcaccctggcaggtgtccacacccccttccgggatgcctgcacacatcatcttctcggtgacttccccctggtacgcatcgtctgcattgcaccgtgtgctgtcaatgacctggactgacgcctgcagcagtatgtcagacatcttccctccattctgcttcgtaaagccccatccaatgatccagagtggggtggctggagtgagctcctcatcaaagaagggcagacagatgggcctgactgtgcctgagaaagtgagtgggaactgcagcttcatgagggcgatgtcattgtctttggggtacatggggttgaattcaatgatgatgatcttggccacagccagggatgggaagctgcccagtttgtctgagcctgcccgcaccttccagttgaacacatcggtatgtttcctgaagcagtgggctgccgtgaggacccagtgggggtccaggatgctccctccacagacgtgctgtttgtcgtactggatgctgacctgccaaggccaagaatccacagaggcctcctccccacccaccacacggggggtcttcaggctctccccacaggcaagacagtgcagggagaccagggagcctgagagacagggcccacttgagttccgcatgcgaagctcctggctgttttctgtgatttcaacaacatccagatcctggtctgggccaatctccacagctctgaaagtgggtttgctgctgtagcccatctgcctacaggctgtctcagcgagagcttctgtaagttgtcgaaacaggcaggaattcctgccaca

SEQ ID NO: 410 - DNA, 1147 bp, Homo sapiens
ggaccattagtacagtgcggtggaattcgcgcattgggatggtgctgggcgtggccatccagaagagggctgttctctggcctgtattgcgtttgaagaagcctatgcccgggcagacaaggaggcccctaggccttgccacaagggctcctggtgcagcagcaatcagctctgcagagaatgccaagctttcatggcacacacgatgcccaagctcaaagccttctccatgagttctgcctacaacgcataccgggctgtgtatgcggtggcccatggcctccaccagctcctgggctgtgcctctggagcttgttccaggggccgagtctacccctggcagcttttggagcagatccacaaggtgcatttccttctacacaaggacactgtggcgtttaatgacaacagagatcccctcagtagctataacataattgcctgggactggaatggacccaagtggaccttcacggtcctcggttcctccacatggtctccagttcagctaaacataaatgagaccaaaatccagtggcacggaaaggacaaccaggtgcctaagtctgtgtgttccagcgactgtcttgaagggcaccagcgagtggttacgggtttccatcactgctgctttgagtgtgtgccctgtggggctgggaccttcctcaacaagagtgctacctgggtaaggacttgccagagaactacaacgaggccaaatgtgtcaccttcagcctgctcttcaacttcgtgtcctggatcgccttcttcaccacggccagcgtctacgacggcaagtacctgcctgcggccaacatgatggctgggctgagcagcctgagcagcggcttcggtgggtattttctgcctaagtgctacgtgatcctctgccgcccagacctcaacagcacagagcacttccaggcctccattcaggactacacgaggcgctgcggctccacctgaccagtgggtcagcaggcacggctggcagccttctctgccctgagggtcgaaggtcgagcaggccgggggtgtccgggaggtctttgggcatcgcggtctggggttgggacgtgtaagcgcctgggagagcctagaccaggctccgggctgccaataaagaaaaaaaatgcgtaaaaaaaaa

SEQ ID NO: 411 - DNA, 2234 bp, Homo sapiens
ggtggcacgaggcgccttccaccctaagatgggtcccagcttccccagcccgaagcctggcagcgagcggctgtccttcgtctctgccaagcagagcactgggcaagacacagaggcagagctccaggacgccacgctggccctccacgggctcacggtggaggacgagggcaactacacttgcgagtttgccaccttccccaaggggtccgtccgagggatgacctggctcagagtcatagccaagcccaagaaccaagctgaggcccagaaggtcacgttcagccaggaccctacgacagtggccctctgcatctccaaagagggccgcccacctgcccggatctcctggctctcatccctggactgggaagccaaagagactcaggtgtcagggaccctggccggaactgtcactgtcaccagccgcttcaccttggtgccctcgggccgagcagatggtgtcacggtcacctgcaaagtggagcatgagagcttcgaggaaccagccctgatacctgtgaccctctctgtacgctaccctcctgaagtgtccatctccggctatgatgacaactggtacctcggccgtactgatgccaccctgagctgtgacgtccgcagcaacccagagcccacgggctatgactggagcacgacctcaggcaccttcccgacctccgcagtggcccagggctcccagctggtcatccacgcagtggacagtctgttcaataccaccttcgtctgcacagtcaccaatgccgtgggcatgggccgcgctgagcaggtcatctttgtccgagaaacccccaacacagcaggcgcaggggccacaggcggcatcatcgggggcatcatcgccgccatcattgctactgctgatgctcacgggcatccttatctgccggcagcagcggaaggagcagacgctgcagggggcagaggaggacgaagacctggagggacctccctcctacaagccaccgaccccaaaagcgaagctggaggcacaggagatgccctcccagctcttcactctgggggcctcggagcacagcccactcaagaccccctactttgatgctggcgcctcatgcactgagcaggaaatgcctcgataccatgagctgcccaccttggaagaacggtcaggacccttgcaccctggagccacaagcctggggtcccccatcccggtgcctccagggccacctgctgtggaagacgtttccctggatctagaggatgaggagggggaggaggaggaagagtatctggacaagatcaaccccatctatgatgctctgtcctatagcagcccctctgattcctaccagggcaaaggctttgtcatgtcccgggccatgtatgtgtgagctgccatgcgcctggcgtctcacatctcacctgttgatcccttagctttcttgccaaggatctagtgccccctgacctctggccaggccactgtcagttaacacatatgcattccatttgtaaatgtctaccttggtggctccactatgacccctaacccatgagcccagagaaattcaccgtgataatggaatcctggcaaccttatctcatgaggcaggaggtggggaaggtgcttctgcacaacctctgatcccaaggactcctctcccagactgtgaccttagaccatacctctcaccccccaatgcctcgactcccccaaaatcacaaagaagaccctagacctataatttgtcttcaggtagtaaattcccaataggtctgctggagtgggcgctgagggctccctgctgctcagacctgagccctccaggcagcagggtcccacttaccccctccccaccctgttccccaaaggtgggaaagaggggattccccagcccaaggcagggttttcccagcaccctcctgtaagcagaagtctcagggtccagacccttccctgagcccccacccccaccccaattcctgcctaccaagcaagcagccccagcctagggtcagacagggtgagcctcatacagactgtgccttgatggccccagccttgggagaagaatttactgttaacctggaagactactgaatcattttacccttgcccagtggaataggacctaaacatcccccttccggggaaagtgggtcatctgaattgggggtagcaattgatactgttttgtaaactacatttcctacaaaatatgaatttatactttgaaactcgtgcc

SEQ ID NO: 412 - DNA, 2457 bp, Homo sapiens
ggcacgaggcttcgtgaagataagaaccataacatgtatgttgcaggatgtacagaagttgaagtgaaatctactgaggaggcttttgaagttttctggagaggccagaaaaagagacgtattgctaatacccatttgaatcgtgagtccagccgttcccatagcgtgttcaacattaaattagttcaggctcccttggatgcagatggagacaatgtcttacaggaaaaagaacaaatcactataagtcagttgtccttggtagatcttgctggaagtgaaagaactaaccggaccagagcagaagggaacagattacgtgaagctggtaatattaatcagtcactaatgacgctaagaacatgtatggatgtcctaagagagaaccaaatgtatggaactaacaagatggttccatatcgagattcaaagttaacccatctgttcaagaactactttgatggggaaggaaaagtgcggatgatcgtgtgtgtgaaccccaaggctgaagattatgaagaaaacttgcaagtcatgagatttgcggaagtgactcaagaagttgaagtagcaagacctgtagacaaggcaatatgtggtttaacgcctgggaggagatacagaaaccagcctcgaggtcccacttggaaatgaaccattggttactgacgtggttttgcagagttttccacctttgccgtcatgcgaaattttggatatcaacgatgagcagacacttccaaggctgattgaagccttagagaaacgacataacttacgacaaatgatgattgatgagtttaacaaacaatctaatgcttttaaagctttgttacaagaatttgacaatgctgttttaagtaaagaaaaccacatgcaagggaaactaaatgaaaaggagaagatgatctcaggacagaaattggaaatagaacgactggaaaagaaaaacaaaactttagaatataagattgagattttagagaaaacaactactatctatgaggaagataaacgcaatttgcaacaggaacttgaaactcagaaccagaaacttcagcgacagttttctgacaaacgcagattagaagccaggttgcaaggcatggtgacagaaacgacaatgaagtgggagaaagaatgtgagcgtagagtggcagccaaacagctggagatgcagaataaactctgggttaaagatgaaaagctgaaacaactgaaggctattgttactgaacctaaaactgagaagccagagagaccctctcgggagcgagatcgagaaaaagttactcaaagatctgtttctccatcacctgtgcctttactctttcaacctgatcagaacgcaccaccaattcgtctccgacacagacgatcacgctctgcaggagacagatgggtagatcataagcccgcctctaacatgcaaactgaaacagtcatgcagccacatgtccctcatgccatcacagtatctgttgcaaatgaaaaggcactagctaagtgtgagaagtacatgctgacccaccaggaactagcctccgatggggagattgaaactaaactaattaagggtgatatttataaaacaaggggtggtggacaatctgttcagtttactgatattgagactttaaagcaagaatcaccaaatggtagtcgaaaacgaagatcttccacagtagcacctgcccaaccagatggtgcagagtctgaatggaccgatgtagaaacaaggtgttctgtggctgtggagatgagagcaggatcccagctgggacctggatatcagcatcacgcacaacccaagcgcaaaaagccatgaactgacagtcccagtactgaaagaacattttcatttgtgtggatgatttctcgaaagccatgccagaagcagtcttccaggtcatcttgtagaactccagctttgttgaaaatcacggacctcagctacatcatacactgacccagagcaaagctttccctatggttccaaagacaactagtattcaacaaaccttgtatagtgtatgttttgccatatttaatattaatagcagaggaagactccttttttcatcactgtatgaattttttataatgtttttttaaaatatatttcatgtatacttataaactaattcacacaagtgtttgtcttagatgattaaggaagactatatctagatcatgtctgattttttattgtgacttctccagccctggtctgaatttcttaaggttttataaacaaatgctgctatttattagctgcaagaatgcactttagaactatttgacaattcagactttcaaaataaagatgtaaatgactggccaataataaccattttaggaaggtgttttgaattctgtatgtatatattcactttctgacatttagatatgccaaaagaattaaaatcaaaagcactaagaaatacaaaaaaaaaa

SEQ ID NO: 413 - DNA, 1042 bp, Homo sapiens
cccttttcatcctccagtgtctcctcaaaaggatcagatccctttggaaccttagatcccttcggaagtgggtccttcaatagtgctgaaggctttgccgacttcagccagatgtccaaggtaaaagtacacctgtaagccagcttggttccgcagactttcccgaggcccccgatccattccagccactcggggctgacagcggcgacccgttccaaagtaaaaaggggtttggggacccgtttagtggaaaagacccatttgtcccctcctctgcagctaaaccttctaaggcctctgcctcgggctttgcagacttcacctctgtaagttgagtcctccgcctccgggccaccccactcccttccgcttgcagcttccctgggatttttgtctccttttaaaggcaaacctcccagcttctttagcctcttggtacctcacactctctgtccctcgcgttatttattctacactgccacttctgtaagaaaaacagtttctcaataaaaaaaaaaagagccgcagtttggatgctctatcataagggcacgttttcttccagcagggaggcgggacctatctgtccttcacggtagattcattgtattatttctgacgcaccgaggctgttgggttcactggtttttggaagccaaaatgtcaaacacttccgaagtatgaaaagaagattgcgaaagttacattagggttctgctgtccccaaaaagccctttgtgcacaagttctcacagtcccgccccatgcattttgtgccacacgtgcaaattgaaggacttcaggcagatcgcgccagggaagagcaatttgaagtttttttttttttaaagcttttaaattccaccccccacctccaagaaaaaaaaaaatccaggttaaaacagcccttttgaaagccaaaccaaaaagagctccaaaaacctgtggagcaaagttaagggccttttcgaaagcaaatctgggaattacaaaagcctgcctttttttttttttgggggaaaaaaaattccaaattgtaacc

SEQ ID NO: 414 - DNA, 1849 bp, Homo sapiens
atgtcgctcatggtcgtcagcatggcgtgtgttgggttgttcttggtccagagggccggtccacacatgggtggtcaggacaaacccttcctgtctgcctggcccagcgctgtggtgcctcgaggaggacacgtgactcttcggtgtcactatcgtcataggtttaacaatttcatgctatacaaagaagacagaatccacattcccatcttccatggcagaatattccaggagagcttcaacatgagccctgtgaccacagcacatgcagggaactacacatgtcggggttcacacccacactcccccactgggtggtcggcacccagcaaccccgtggtgatcatggtcacaggaaaccacagaaaaccttccctcctggctcacccaggtcccctggtgaaatcaggagagagagtcatcctgcaatgttggtcagatatcatgtttgaacacttctttctgcacaaagaggggatctctaaggacccctcacgcctcgttggacagatccatgatggggtctccaaggccaacttctccatcggtcccatgatgcaagaccttgcagggacctacagatgctacggttctgttactcactccccctatcagttgtcagctcccagtgaccctctggacatcgtcatcacaggtctatatgagaaaccttctctctcagcccagccgggccccacggttctggcaggagagagcgtgaccttgtcctgcagctcccggagctcctatgacatgtaccatctatccagggagggggaggcccatgaacgtaggttctctgcagggcccaaggtcaacggaacattccaggccgactttcctctgggccctgccacccacggaggaacctacagatgcttcggctctttccgtgactctccatacgagtggtcaaactcgagtgacccactgcttgtttctgtcacaggaaacccttcaaatagttggccttcacccactgaaccaagctccgaaaccggtaaccccagacacctgcatgttctgattgggacctcagtggtcatcatcctcttcatcctcctcctcttctttctccttcatcgctggtgctccaacaataaaaaatgctgcggtaatggaccaagagtctgcaggaaacagaacagcgaatagcgaggactctgatgaacaagaccctcaggaggtgacatacacacagttgaatcactgcgttttcacacagagaaaaatcactcgcccttctcagaggcccaagacacccccaacagatatcatcgtgtacacggaacttccaaatgctgagtccagatccaaagttgtctcctgcccatgagcaccacagtcaggccttgagggcgtcttctagggagacaacagccctgtctcaaaaccgggttgccagctcccatgtaccagcagctggaatctgaaggcatgagtctgcatcttagggcatcgatcttcctcacaccacaaatctgaatgtgcctctcacttgcttacaaatgtctaaggtccccactgcctgctggagaaaaaacacactcctttgcttagcccacagttctccatttcacttgacccctgcccacctctccaacctaactggcttacttcctagtctacttgaggctgcaatcacactgaggaactcacaattccaaacatacaagaggctccctcttaacgcagcacttagacacgtgttgttccaccttccctcatgctgttccacctcccctcagactagctttcagtcttctgtcagcagtaaaacttatatattttttaaaataacttcaatgtagttttccatccttcaaataaacatgtctgcccccatggt

SEQ ID NO: 415 - DNA, 2555 bp, Homo sapiens
atgtcgttacgtgtacacactctgcccaccctgcttggagccgtcgtcagaccgggctgcagggagctgctgtgtttgctgatgatcacagtgactgtgggccctggtgcctctggggtgtgccccaccgcttgcatctgtgccactgacatcgtcagctgcaccaacaaaaacctgtccaaggtgcctgggaaccttttcagactgattaagagactggacctgagttataacagaattgggcttctggattctgagtggattccagtatcgtttgcaaagctgaacaccctaattcttcgtcataacaacatcaccagcatttccacgggcagtttttccacaactccaaatttgaagtgtcttgacttatcgtccaataagctgaagaccggtgaaaaatgctgtattccaagagttgaaggttctggaagtgcttctgctttacaacaatcacatatcctatctcgatccttcagcgtttggagggctctcccagttgcagaaactctacttaagtggaaattttctcacacagtttccgatggatttgtatgttggaaggttcaagctggcagaactgatgtttttagatgtttcttataaccgaattccttccatgccaatgcaccacataaatttagtgccaggaaaacagctgagaggcatctaccttcatggaaacccatttgtctgtgactggttccctggtctccttgctggtcttttggtatcgtaggcactttagctcagtgatggattttaagaacgattacacctgtcgcctgtggtctgactccaggcactcgcgtcaggtacttctgctccaggatagctttatgaattgctctgacagcatcatcaatggttcctttcgtgcgcttggctttattcatgaggctcaggtcggggaaagactgatggtccactgtgacagcaagacaggtaatgcaaatacggatttcatctgggtgggtccagataacagactgctagagccggataaagagatggaaaacttttacgtgtttcacaatggaagtctggttatagaaagccctcgttttgaggatgctggagtgtattcttgtatcgcaatgaataagcaacgcctgttaaatgaaactgtggacgtcacaataaatgtgagcaatttcactgtaagcagatcccatgctcatgaggcatttaacacagcttttaccactcttgctgcttgcgtggccagtatcgttttggtacttttgtacctctatctgactccatgcccctgcaagtgtaaaaccaagagacagaaaaatatgctacaccaaagcaatgcccattcatcgattctcagtcctggccccgctagtgatgcctccgctgatgaacggaaggcaggtgcaggtaaaagagtggtgtttttggaacccctgaaggatactgcagcagggcagaacgggaaagtcaggctctttcccagcgaggcagtgatagctgagggcatcctaaagtccacgagggggaaatctgactcagattcagtcaattcagtgttttctgacacaccttttgtggcgtccacttaatttgtgcctatatttgtatgatgtcataatttaatctgttcatatttaactttgtgtgtggtctgcaaaataaacagcaggacagaaattgtgttgttttgttctttgaaatacaaccaaattctcttaaaatgattggtaggaaatgaggtaaagtacttcagttcctcaatgtgccagagaaagatggggttgttttccaaagtttaagttctagatcacaatatcttagcttttagcactattggtaatttcagagtaggcccaaaggtgatatgactcccattgtccctttatttaggatattgaaagaaaaaataaactttatgtattagtgtcctttaaaaatagactttgctaacttactagtaccagagttattttaaagaaaaacactagtgtccaatttcatttttaaaagatgtagaaagaagaatcaagcatcaattaattataaagcctaaagcaaagttagatttgggggttattcagccaaaattaccgttttagaccagaatgaatagactacactgataaaatgtactggataatgccacatcctatatggtgttatagaaatagtgcaaggaaagtacatttgtttgcctgtcttttcattttgtacattcttcccattctgtattcttgtacaaaagatctcattgaaaatttaaagtcatcataatttgttgccataaatatgtaagtgtcaataccaaaatgtctgagtaacttcttaaatccctgttctagcaaactaatattggttcatgtgcttgtgtatatgtaaatcttaaattatgtgaactattaaatagaccctactgtactgtgctttggacatttgaattaatgtaaatatatgtaatctgtgactttgatattttgttttatttggctatttaaaaacataaatctaaaatgtcttatgttatcagattatgctattttgtataaagcaccactgatagcaaatctctctcc

SEQ ID NO: 416 - DNA, 2950 bp, Homo sapiens
tgcaagtgacttcattcggagcctggaccactgtggatacctatctctggagggtgtgttctcccacaagtttgatttcgaactgcaggatgtgtccagcgtgaatgaggatgtcctgctgacaactgggctcctctgtaaatatacagctcaaaggttcaagccaaagtataaattctttcacaagtcattccaggagtacacagcaggacgaagactcagcagtttattgacgtctcatgagccagaggaggtgaccaaggggaatggttacttgcagaaaatggtttccatttcggacattacatccacttatagcagcctgctccggtacacctgtgggtcatctgtggaagccaccagggctgttatgaagcacctcgcagcagtgtatcaacacggctgccttctcggactttccatcgccaagaggcctctctggagacaggaatctttgcaaagtgtgaaaaacaccactgagcaagaaattctgaaagccataaacatcaattcctttgtagagtgtggcatccatttatatcaagagagtacatccaaatcagccctgagccaagaatttgaagctttctttcaaggtaaaagcttatatatcaactcagggaacatccccgattacttatttgacttctttgaacatttgcccaattgtgcaagtgctctggacttcattaaactgggcttttatgggggagctatggcttcatgggaaaaggctgcagaagacacaggtggaatccacatggaagaggccccagaaacctacattcccagcagggctgtatctttgttcttcaactggaagcaggaattcaggactctggaggtcacactccgggatttcagcaagttgaataagcaagatatcagatatctggggaaaatattcagctctgccacaagcctcaggctgcaaataaagagatgtgctggtgtggctggaagcctcagtttggtcctcagcacctgtaagaacatttattctctcatggtggaagccagtcccctcaccatagaagatgagaggcacatcacatctgtaacaaacctgaaaaccttgagtattcatgacctacagaatcaacggctgccgggtggtctgactgacagcttgggtaacttgaagaaccttacaaagctcataatggataacataaagatgaatgaagaagatgctataaaactagctgaaggcctgaaaaacctgaagaagatgtgtttatttcatttgacccacttgtctgacattggagagggaatggattacatagtcaagtctctgtcaagtgaaccctgtgaccttgaagaaattcaattagtctcctgctgcttgtctgcaaatgcagtgaaaatcctagctcagaatcttcacaatttggtcaaactgagcattcttgatttatcagaaaattacctggaaaaagatggaaatgaagctcttcatgaactgatcgacaggatgaacgtgctagaacagctcaccgcactgatgctgccctggggctgtgacgtgcaaggcagcctgagcagcctgttgaaacatttggaggaggtcccacaactcgtcaagcttgggttgaaaaactggagactcacagatacagagattagaattttaggtgcattttttggaaagaaccctctgaaaaacttccagcagttgaatttggcgggaaatcgtgtgagcagtgatggatggcttgccttcatgggtgtatttgagaatcttaagcaattagtgttttttgactttagtactaaagaatttctacctgatccagcattagtcagaaaacttagccaagtgttatccaagttaacttttctgcaagaagctaggcttgttgggtggcaatttgatgatgatgatctcagtgttattacaggtgcttttaaactagtaactgcttaaataaagtgtactcgaagccagtaagtgctctgggacctcattattttaagcctggtagttaaaaaaaatcttgcaaaaggatgccaaagaagataaggacgtggaaagaagtttaatttgatgattaaaaacatgcaacagttttgtgtcttagctctcctactaggattatcggcgccttgaaggaattctcattcatctttgtgttacctttggtctgggtcacaccaactggtatactgaatgcatattaacttagtatagtgcctggcatgtaagagattctcaacaatattctcaataaatattcgctgaatatgagataaattattaatagctactgaataaagaaagattatttaaaaccagagaggaaactccatatatgttctttaatccaaacagtttaattcaagcaatctggaatataaaaagcactttctgatattagaaggagatcagactcccaaaaaagatcagcattctttagtcaagcaaaacttggaagtttacaaacagctaaatcagaagcttgaaattcaggtcctctccagtacctgctacattatatgtaattccaaacatgacttcagagattaaagaagaaagggaagatgtttcccattcttttgtaccctatataaactaagggtaccctgccctaatcttttttccaacacttccccaaataacccttccttacaaagaaagaagtctaagagaactctctcatctaaatatatttaagtagaggcaagcctgaaaaaaacacaaaaacctaaatggtgttaggctgtggttcacctattctcatggcacctcaaattaatggcttgggtgttggtgtaggtaacgcttggcctgtatgttgaggtagtcactagataaaattctgggcacaacatccgtttagcaattgggcatacattctacagatttagccataacgttctgaagctgattattttacagatcaactaattaattcctctccctaactttacagatgagaaagctcag

SEQ ID NO: 417 - DNA, 850 bp, Homo sapiens
  misc_feature (1)...(850): n = a,t,c or g
ctttcacaaaaatccatgaattattctttaataaaagaaactcttggccccgcttttttggatacacagaatgctttccattgaatcatttggtcataatccgggtacaaagcaaatttaacacgtgtgagagatgcagaaaaaggtcccttctatgtacaccttgccaaatacaagaacataaagaaagaaaaaagcaaagtttaagcctttaggtcatttgtaaaatgttgccaaacccatgctgctacttttaacagagaagtctgagttttaaaattcaaacgttcttttcttacaaagaaaaagtgcctctatctgccaagcgcatgatcttatgagcttcagatagaaaagtggctatgacttgtgactgtttttggttcagaacaatgctagatcaacatgcaagttgtatggaggtggggacagaaagggagcggcaggctggggtggctggtaatgtttgatccctctggatttcccacaggagaaaaggttctgcaggacgatgagttcacctgtgacctcttccgattcctgcaactactctgtgagggacacaactcaggtttgtgagtccccggaacttctgatgatactaaggcataaataatgttttcaagccagtaataacaagagcctgttagttccaattatgcatcgttctagagacagcaaatcattctagagcatggctctgcattgggatctgggncgttttatntttggggtccgcgcacgtccacaatntcaaannnncggcgcccaggggtcccgccccccgagacgaattagatagatggaaggtgtgaatggtggtaaagatggacaaagtgatgcggggtgg

SEQ ID NO: 418 - DNA, 360 bp, Homo sapiens
gagataacccacattgttggagagacagctgcctttctatgccccaggctgaggctgagacggggtgggaaggatggatccccaaagcctgggttcttggcctcagtgattccagtggacaggcgtccaggtgagtaggacatccagaagatttggacttggagatgtttccccctattttgagtgtccagattaagagctggctgccctagtcattttaaaacatgctgggaatccaagttgggtctcctcattttaatgatgtctaggctgagggctgggcctttcattcttgagtccctgggctcagaagtgggtctctttccctcctctcagggtactgaggaaggaccccaggtg

SEQ ID NO: 419 - DNA, 949 bp, Homo sapiens
  misc_feature (1)...(949): n = a,t,c or g
atttgatggtaatttgctgggattacaggcgtgagccaccacacccggccggaagatattaattcttatatgtgtatgttcaacagatactgaatctcaggtgaagcaaagtgccttcatcattgtagcaaatcctacatttaaatgaaatcagataagtactggcatataatcaaaatttattttttatgttgattcccaatcaatgatttttttttttcaaacaccaacaagacataaagtacttattatggaattttgtccatgtgggagtttatacactgttttagaagaaccttctaatgcctatggactaccagaatctgaattcttaattgttttgcgagatgtggtgggtggaatgaatcatctacgagagaatggtatagtgcaccgtgatatcaagccaggaaatatcatgcgtgttataggggaagatggacagtctgtgtacaaactcacagattttggtgcagctagagaattagaagatgatgagcagtttgtttctctgtatggcacagaagaatatttgcaccctgatatgtatgagagagcagtgctaagaaaagatcatcaagaagaaatatggagcaacaagttgatctttggaggcattggggtaacattttaccaaggcaagcctactggatcaactggccatttaanacccctttgaaggggcctccgtanggaataaagnaagtgatggtataaaaataattacagggaaaggccttctgggtgcaatatcctggagtacagaaaagcaagaaaaatgggaccaatttgactgggagtgggaagacatgcctgtttcctgcagtccttcctcgggggtcctcagggttcctaacttaccccctgttcttgcaaaacatccttgaaagcagatcaaggaaaaagtgttgggggttttgaccaagttttttgcaagaaaactagtggg

SEQ ID NO: 420 - DNA, 986 bp, Homo sapiens
ttttttttttttcttcagcattgtgttttactttttgggagagaggctaggaggaggaaggggtgaaaacagcatctcactggagtctcaaaagtgtatgaatcttctggtagtgcaaggatgggataagatggccagggaagtcagatggaaaatccccaagattctttttgctactgatttctataattaaaatatgacatatgtaagggactagtgcatgatattcaataaatgtcagttgtctttcctaactaggttcctcacaggctaggttatgcctagatatcatcatcctcctttcagggaatgaagctcacctagaaaactagggaactaaaagtgcaatatggtttgggtaatgcagttggttagctgtctccccatcctcccaactcactattccagggaggggctgaaaacagaagtggctcccctgaagtctagttagcatgtcatgacagagtccacatgaagggctgtgggctgcaactttctagtgcacagtcctctctttttggcgatgataattgtagggaaagaagcgcacacgcatgctgatttcacgagctgtcttcaggatctcaacagccttgctgtgctcaatatcttggaaatccacatcattcacagctagaacttggtccccttcctgcagtcctgctctatgtgcatcagagtcaggaatcaccttggagatgaagatgcctagctgggaggcctttcctcctcggatgttaaatcccaactgagctccaggaggcttcttcagtgtgatggttcggggcagaaactgggtcaactcattgttgtagtccgggtggtgtaccctctcatgaggaggaatccatgctggaggattctcataggcaggcaagaaaaccaccgggtagtcatcataaggaatccggctgtccatctcgggcaaggcccagtgggcagtccacagcgacctcagactccgctcacacgaaatcgtcgacccg

SEQ ID NO: 421 - DNA, 1209 bp, Homo sapiens
ggcacgagcaggtctctgcccttcatagacgcataaaggctatcgtagaggtggctgcaatgtgtggagtcaacatcatctgtttccaggaagcatggactatgccctttgccttctgtacgagagagaagcttccttggacagaatttgctgagtcagcagaggatgggcccaccaccagattctgtcagaagctggcgaagaaccatgacatggtggtggtgtctcccatcctggaacgagacagcgagcatggggatgttttgtggaatacagccgtggtgatctccaattccggagcagtcctgggaaagaccaggaaaaaccacatccccagagtgggtgatttcaacgagtcaacttactacatggagggaaacctgggccaccccgtgttccagacgcagttcggaaggatcgcggtgaacatttgctacgggcggcaccaccccctcaactggcttatgtacagcatcaacggggctgagatcatcttcaacccctcggccacgataggagcactcagcgagtccctgtggcccatcgaggccagaaacgcagccattgccaatcactgcttcacctgcgccatcaatcgagtgggcaccgagcacttcccgaacgagtttacctcgggagatggaaagaaagctcaccaggactttggctacttttatggctcgagctatgtggcagcccctgacagcagccggactcctgggctgtcccgtagccgggatggactgctagttgctaagctcgacctaaacctctgccagcaggtgaatgatgtctggaacttcaagatgacgggcaggtatgagatgtacgcacgggagctcgccgaagctgtcaagtccaactacagccccaccatcgtgaaagagtagccggcttcagtgcctgccttggggtgaggaagacacctctgccccagtggattagcaagtgtggcaggcttaacatgtccaggttctccccaataacattgtccaggtggttttaaaattcccaggcagggggagagtggcatggggagtgacttcttaatgggtaaggggctgcttacttctggggtattggaaatgtttggggactaggtagaggtgaatgtactaaatgccactgaatttgtatacttcagaatgtttgttatgtaaattttacctcaactaaaaaaaaaaaatgcccaggtaaaaaaaaaaaaaa

SEQ ID NO: 422 - DNA, 5214 bp, Homo sapiens
acggccgccccttttttttttttttcacagttccatttttaatgtttaaatttcatttcaaaaagcaggtctgtagtttgtaaccatgacaattaaaatctgtgctaatgcacggcagtctataacaattctacaagccaatcagacagtacgtgacatttcaatgagtaaaaaagagcataaaactgtatgtgtaagaacaaaatgttaaaaggcctaccacaataataaaaaaccgtcaattacatcatcacattaaaataagccagatgtacaaaagtctgagacagagaagacaaaaggacaacacaagatatttgttgaaaaatgtttgtgctctttgggcacttaattaaacattgcaaaatcaacatcatcttcttcttcatcagactctgcaaaatattttacttctttcctagcccgaccggttcgtggcagagaaggtggctcagtagggaagtctgaggggaagatgtccacatctgaatcctgatcaaaagatgtcttcttcggtttcttgcttgttgttttggatgttttcctgccagggttataatcgccttcattttcagagccagatgctttccttttctttgcccctcggcctttaccttttggtgttgtagtcttctttggaatgccaaattctgaatccgagtcagagtttacagcctctactactttcttctgttttggggctctcttgggcttagggactgtatctgaagacggttttccctttttagcagctaccgttttacttggaactttatctgtctgtttcagaccaaatgatggtgaaaaaacagaagcagaatcttcttcattactgtcaaatttagctgaatcatcttctgacttctgagaatatgaaggaaatgagaagagatttccaaaatcctgactttttttgtcatgcaaagatttttctggagtggcttttgatttgcctggtgaaaatgtatattcatctttatctaacccatctgaaggaacaaattcatcttccccatcatttgttatgggagatgctttaactttcaattcctctaaatcattattgtcatcatcatcatcatcagcatcatcatcctcttcttctgagaaatcaaatgtgtatttaggtctttcggctgctgctctcctaagcaaagaatctcttggaataaccacaggttctgtttcttccaaatcactttctgacttggattcatcatctgaccaaggattccgtttcttcactttctttgcactaggtttaccagatgatgtaggtgtttttctcactctggtaccaggctccttcttctccctcttaggtttgggacctttatttataggaactgatggagtcaatgcctcttctcctgcaccttctactggtgctccactgaattcttcatcaaattccacttttactgctgcagtatcaagatcacccttcttcttcttcagcaactttttgctggcatctgccttcatagctgtaatttcaggaattattcttctgccataaggtgagggcattgtctcttccaactggagtttcttcaccttaggtttgccaactttacctttaattgcttttccagacattccagccagaacatcttctcgttcttgagattccactttatccagttcttcaacaaatgccgctaaatcctctttccaaagatctgaaggagattttcttttaagatcattgacctctcgcccttttgcatctctctgtttaatcagttcttcaactttttctttagtaagagaccacagagacatatttaaaatataattaaaatctgggcctgaaggagttcctgaatcggaggaactatcatcatgctggttttgtgtttcatcctcttctgctgccttttcttgtgcttctttccaggctttcactgggtcagattcataacctctctggactaacatttgaatcaaatctttctttgacctattctatatagtaattttcccttgtatcttctctaaaatgaaacgggcttgattgttaagcttcgtaaattctgctcccaacattcccacaagccactccttacgtaacccgtaataacttaatcgtaaatcaaagaattctttcagaatgtcttgcacagtttcatatttcttcagacatcccatatgatcaaaaagtaccatggaattacaagtaagagtagtttgaagtttaaaaactttatgcagtccagcagcttctgcttgtgctagtttctcttcagtcattttcaccacaaatttcacagttgtgtcagtatgatattctttataatcagaaattaatgctggtgttttatctgttccatttagcataggttctaaaacctgttctttatatacctgtgtccaagttctaactggaagctctgtaatttctactgtgtttctgtccactacaaatatttcaccactgactgcatactggttttgaccaagttcttgaatcgtgcctttaaagtttttgtagtttggaagcatgggatgaggatccaggccatctagcattcgtctgacattgttcacaatttccctagcatcatagttgggtagtttacaagcccatccagtaccaatgccctcagcaccatttattaaaaccatgggaattataggaatataccactcaggctctacacgttgattatcatcataaaggaacttaaggaggttgtcatccacagcaggaaaaagtagccttgctaaagtgcttaacattgtgaaaatataacgagggcttgcagcatctttgccaccatgaagccgagttccaaactgaccaataggctgaagcaagttaatgttgttacttcccacaaagttctgagccaaattcacaatagtcatcatcaatgcttgttctccatgatgataagccgacatctcagcaacagagccagccaactgggcaacttttacttcacgtttatcattcctcttgaaacaggtaaataaaactttccgctggccaggtttaaagccatcaacaagagatggtatagatctttcattgtctgagtttgagaagagaatcaattccttgttgatgaaatcattataagtcaaatgctttgttgcagtaccatataaaaattgctctggtaagccatgtagcctacgctgtctccggtcttccataaaatttgttaaccattcttttctgtcatcaatcttcttcttactaaatgccaaggtaatggcagcatcatcttcaggaccagcatatctaaacaagatgcgatgcctttccatatcagcaaaatattcctttgcttctttagctgtactagtacccaatcctttatagtactttattttccaggctttctggttttctatatgttttttccattcgtcaaattcaggaatactgtagaaggaaagttcctgcttatttttgcttgcctttacaataggagtaatgaactcttcaagaaaaccatgcttcaaaagtgatggccaattgtgatggatgaaattaataagcaggccttttatgtgagaaccatcttgatcctgatcggtcataatcataatctttccatagcgtaaggttttcagagattgtgcatcatcgtaacttttcttatattgtagaccaactattttaataatattatttatttcagcattttccatgatctgtttatgagaagcttcccgtacattaagaattttgcccctgagtggaaaaactccgtatctgtctcgtccaatcacacctaatccagacacagccagtgatttggcagagtctccctctgttaatatcagtgtacactccagggaatgtttaccaccagcatcattagcatcatccagtttgggaatacctttgattttactgtattttactgatgaacacttcttattcagctgagtctgagccttaaatttcacccagttcaggatactttctacaatgccacaattagaggctgctttaaaaaatttttctgacagctggcatttagacccaaaacttttgggctgcagagtcatgttttccttagtctgagaatcaaaagttggattttcaataaggcaattaataaaaacccatatatggttttttacttgaaatggtttcactgatacaccagctttgttctttttcttaactacttcaatcagtttaccaacaacttgatctaccacataatccacgtgccgtccaccttttgtagttgcaatactatttacaaagctgatttgctggaatcctttttcactcaatgtgagacaaacatcccatctttcatttgcaagctcatgaataactttcagggccaccccagtttcatccaatttgtctttcacataaagatctacataactgcgaaatccatttacaggcaatttctttccattaaacatgaccttgacccctctacacgaaccagccaaatcatatgcccttctagtcatgagggccacaatatccttgtcaagtttttccatcttaaatttggacagatctggttggaatgttatgcatgtgtaatcttcaccatcaaaatgtttaattttggcttcagaagtcttcatcatattattcatccatgtctgcttaaaactgtgtttgtattctttgcaagctgtttctactgtaaactttgtactgaaaatattacaaagttttgcaccataaccattacgaccacctgtaacttttttctcatcatcatcatagttactggatgttaaaagctgtccaaaaattaaagcaggaacataaactttctccaccttgtgttctactactggaatgcctttcccattattccaaatgcttataatgttagattcaggatcaatagaaactttaatacaagtcatgttcttatccctctgtttattgtcagcagcattaaccaaaatttcatcaaagatcttgtataaacctggcacaaaggtaacctccctgcaattcattcctacatcttcatcatacacccacatgaactgcgtcaatggctccactgacccaatatatgtatcaggacgaagaagaatgtgttcaagttgtgtcttcttctgatacactctctcaacagacaacttctttgaagaatcatttttgttggcagtttctgactcttctttttttgcagcattgttcacccaggtcagtgccccgttgccgccgcccacgccggctcccgcgccgcagccacccgacttggccat

SEQ ID NO: 423 - DNA, 474 bp, Homo sapiens
aagggttgtctggctgcctccttcaactgcatcttcctgtatactggggaactgtatcccacaatgatccggtgagtggaagcctaatgggagaatgacagccttttcctggggaaagacattcttctgtgcacaggtcagaccccagagctaaatcaagtacatcccagcccaaaggcccctcccaacactcatcattgcaaggcacatagtagccactgagtacacacctcatggcctagctaacacaggtgttactgtcctctaagcccttacgggaccctagaagatctcaaaagtagccaccaactggggcagggtaaggaaccaagaagacacatctcagagacaacaaatcgaagtcttcctttaatctccaaaacacaaattagaagctgccaccacatctacattccatctataaaccaagtgatatatctgaaagcaaaggccacaaacatgaaagcaatttcc

SEQ ID NO: 424 - DNA, 1453 bp, Homo sapiens
tttaagttgagaactttcaccttttcatttaaaaggaagcactttgtggcttctctttggcatatccgaatcaccagcatcatcactactcctgctctctggggccactgttaagcaaagtgaggactgcttggtcacaggcactgtgaatgctgggatagttgatctgatcaccaagacggctactaagtcactagcagggtgggtggcgtatacagcgtggatgtgctggaccaagggatgactcacatccccggccggctggagccggacagcgagagatttcatcacgctactcagaagggcacaccatttgagacttaaaattctttatttctggaattttccatttaatatttttgaactgcagttgactgcaggtaacaaactgtggaaagcgaaaccatagatacgagcgggctactgcgttcaaaaggctcttcaactgttgtggatcctctgatgttctcggagatggtttaggtggttacatgccttcccgcactccttacattcgtaggatttcgccccactgtgcgttttctgatgttgtgtaagctgatggccgtgactaaagctcttcccacattctgtacacccatagggtttcaccccggtatgaattctctcatgtttcacgaggctcgatccataaatgaaagccttcccacactccttacatttatacggggtttcgcctgtgtggattctctcgtgctgagtgaggtgatagccacaattgaaggccttcccacattctgtgcacttgtacggcttctcgcccgtatgtatcctctcgtgcttaacgaggctcgaaccccagcgaaaggccttcccacactccttacattcgtgaggcttctcaccggtgtggatcttctgatgctgagtaaggtaattgactcgagtaaaggccttcccacattcttgacattcatagggtttctcacctgtgtgaattcttttatgctgaatgaggcttgaaccacaaataaaagccttcccacagtctttacactcgtaaggcttctccccactatgaattctcttgtgctgaataagtttatacacacggctaaaggtcttcccacagtctttgcattcgtagtctttctccccagtgtggaatctctggtgctgagtgagctcatcaccacgccgaaaggcctttccacagtctttacattcatagggtttttcaccagtatgaatcctcttatgaataacgaggcttgagccccatcgaaaagccttcccacagtctttacattcgtagggcttctccccagtatgaattttttgatgttgagtaagctgattgccccaacggaaggccttcttacattctttacattcataaggtttctcaccagtatggattttctgatggtgactaagttgatagccacgactaaaggccttcccacagtccttacattcaaaggaattctcc

SEQ ID NO: 425 - DNA, 1131 bp, Homo sapiens
gtttccctcatgattttattgtctcctggggaccctgctttgggcggtctggatgtctgccttgggcctagtttgaggcgccccgaaggtggagccatcttggtctcgtaatttgctcttccctgccccccaagagggaagccagagctagcggggccagcactgctcaggaggcaaggtggcctacctgtcgcacacccggaggaggaaatcattgaccaggctctcgtgccggctgcagatgcttctcttggaaggcactcttgagccagtcctcaatgctgcacacctgcacgcggctggagtgccagcagatggagaggctgcggagtgccgggcccaggaggaagttgtccttctggagttcagtgagggaacggaagtgcagcagggaccagagtgcggggtcctcaaacacgtcgtggagctgggagcaggtcctggcaaggctcttcctgctgtccttgtctaggaaggagaagaggtgcagcaggcactcccggttgagctgggttatgtgcatggtgagcagtggccacatgtcacttcatcctggcccaggtactgcagctccaaatcgtggggattctgtaagagcttgctacctgttgactgaggaggcccacgagttgagaagaactagcaagagtggtacaaaactgcaggtcattgggctggccaccaggtattcccacccaccagaagctggctgttgtactcacccggaaccatggtgcaccaccacagcggcgaggtcatacaggcagctctccgggccactgttctcaggctacagaacaaggaagaaggagcagtggtcaatgacatcagtatctcgatgacctctaccctctccatgtgatgacaatcttactgaagagccattttttcaccatgctaaaaaggccagttgggtccagcagctttgcctctctacccttttatcaccaaagtatactgctgagaaagaatcaaatgaaaagaaaaaagactcaacaagacctcactcatattaactggactctacaagcagtgagcatccagacctgcatttggttacaaaagaagccttcaagctattttcatcagcttcctaatcaagttaaaaaataaaccacaaaactgagaaaa

SEQ ID NO: 426 - DNA, 551 bp, Homo sapiens
  misc_feature (1)...(551): n = a,t,c or g
gcttgggctgtcctctgatgccatgttgtcagcccagacaggcagtgtgatcagggctcctggcagagggtctcttgagacacagccactgcccctgcttggtggtcgtgacttgggacgcagcctgcctgtgactggagctgggggtgacgggtaagatgagtggagatgttgggccagtggggcctgattcccagactggaccaaaccccaggggctgtcctccaatccggaccatcttccagagctctccggatgcgcttgtgaacagcaagttactaggaaacctctgctgcgtctgcacgtccatcaccagggagatgtagccctcgatgagggagaaggagaagaagcggatgtggccgcagtcatccccagtggccatggggtccttcactccattggagtagaacatgacatccatgaggagtgtggcaacagcaggcagcgtgtcagggtccaggctggtgacacagaacctgttgctcgggctggccgaattccaccacntggactaaggtctactatnaggggcctcaattggacgtgcc

SEQ ID NO: 427 - DNA, 1579 bp, Homo sapiens
agtcacctccagaccccagaagctctccccaacccagccgagttcctctgcaaacaattcaaggggctctgataggtcacacagtgccaccttgtgtgctggaccatatctggagggagaactgagtgagggggcacaggggattgtctccaggtggggcgagcaggggaaggaaaatagtggccacttttacattggtttgggtagtaattattgattcaggaagcaaatacaaaatcctgaatgaaatgacttggaaaaagtaaatagaatcaagatcccaagaggagctgaagataaataaatgggagcaggatgtgggggaatggtcggtaagtgagaaatgctaaaatgatagaataaagcttaaggattgttggaggtagagcaggaactgtgtactgcatagttcccaaatgccctggtgttccaatgggggatggaaactaaaacactggccaggttggatttcatactgtagtcctgccatttttcttcctagagcagagataaaagttggccctgggcgatagctcattctctctgaaaggctgctagttaggcccagcctgtcaccctggatcatgagtgtcgtgtgtattgggacttacggcagggggctgaggcttgcagatgggcaagtggtgagaggccccactgacctcagtctgtttctcactggagcgcaggtttgggagcagcagcaacaccacatccttcggcacgctcgcgagtcagaatgcccccactttcggatcactgtcccaacagacttctggttttgggacccagagtagcggattctctggttttggatcaggcacaggagggttcagctttgggtcaaataactcgtaagtatccccctttttgagtctcaccttaattaaaagcattaaataaggttggaagtgtgtggatcttgctggatttgtgcattttcttttcgttttttcctgtttttagagtttgtcctggaagtgtgggggttcagcagcagggtttgggttttgtggacttgctcttctctgtagcaatatggcaggaggtgccaggcctcgccttcttaagaggcgtggttcaaagagaaaagagcacgcctgccagtgagctgggcctgagggcagcgctgaggagatgctgctcctgacttccctggaggtttctcagaagctgcatgctaacccctgggctctgggccatcaccaggtctcatgtgttgatccaccctctgtgcttctgtgtaaaatttcatggcgttaaaattcagtcttagccaggtgggtggttcacgcctataatcccagcactttgggaggctgaggtgggaggattgcttgagcccaggagtcaagaccagcctgggcaacagagtgagaccccatctctactaaaaattaaaaaaattagccgtgcatgctggcttatgcctgtggtcccagctactccagaagctgaggcgggaggatcacttgagcctgggaggttgaggctgcagtgagccaagatggtaccactaccgtctagcctgggtgacagccagaccctatatcaaaaaaaaaaaaagggggggcccttt

SEQ ID NO: 428 - DNA, 413 bp, Homo sapiens
tcgaggagccccagggtagtcccatctgggtatggctggctgggtcactaacttctgtgagctgcttccttcctttccagaggatgcggatcaaacctcaccaaggccagtacataggagagatgagcttcctacagcaccacaaaggtgaatgccgaccacagaaagattgagcacgacaagaaaatccctgcgggccttgctcagagcggagaaagcatttgcttggacaagatccgaagacgtgtaaatgttcctgcaaaaacacagactcgcgttgcaaggcgaggccgcttgagttaaacgaacgtacttgcagatgtgacaagccgaggcggtgagccgggcaggaggaatgagccttcctcaggggttcgggaaccaccttctctcaccaggaaagactgatacag

SEQ ID NO: 429 - DNA, 1567 bp, Homo sapiens
cccacgcgtccgctccaggctcctggagtgcctcatgctggctaagttctctctgggctcctccaggggttctgtgtgctcttggaggtccctctgctagtggtggctaactagagagtcagcaggggggtgactgggaaagagggagaggtgatgttgcctgctactcccctccttgcggaccctcataccacatgacgtggcggcgtggggccaggaactagggaaggcagaaggcgggcgcagtgggcagctctctgggctcagcttgctgagggggcctcctgtcctggctctttctgggagacctcattcttctgcccatgttcctgcctcacacattccccgtgatgaacgctgtgggcggggcccggcctgtgccctcagtcccacagctcctctagtgtacctgccccgtgggaaccccatgtggaaagagccctcagaactgacaggaatcagggacagaggcccttgctgtcagcctcctgggcacctgcacctgccaggcctctctttcttaccagcccagtgctgctgccaaaatccagggctatcccagctgcccgggaccccagttgagccgggatattttgtcttctggagatggctggtgggcaggcctcagtggtcatcatagggtctgcgggggtcctggggtgcaggtggggctcctcagggaagagccatagtctgtccccaagtcggaagggtaatcttcatcttctctcacaggagccacaaaccactgtggtacacaacgctacagatgggatcaagggctccacagagagctgcaacaccaccacagaagatgaggacctcaaagtgcgaaaacaggagatcattaagattacagaacagctgattgaagccatcaacaatggggactttgaggcctacacgaagatttgtgatccaggcctcacttcctttgagcctgaggcccttggtaacctcgtggaggggatggatttccataagttttactttgagaatcgtgagtgggttcgtgctgctgatatactcctgcctgcccctttacccctttgtctctgtctcctgctcaccttctcatcccagttgcccacttttcccttatttgaccttcgtgctgcactcctactctgtatgcttgtccccttgtgccccgatggttgtagacaggcacctttgaaggccctgctcctgagctccaagtgccattcattctgcagctgctttgtggcagtgccagtcaccacaatcaagctcacttatttcttgccgggcgcggtggcttacgcctgtaatcccaacactttgggaggctgaggctggcggatcacgaggtcaggagatcgaggccatcctggctaacacggtgaaaccccatctctactaaaaatacaaaaaattagccgggcgtggtggcggtgcctgtagtcccagctactcgggtggctgaggcaggagaatgatgtgaacctgggaggcagagcttgcagtgagccaagatcaggccactgcactccagcctgggcaacagagcaagactccatctcaaaaaaaaagaaaaaattattta

SEQ ID NO: 430 - DNA, 728 bp, Homo sapiens
ctttccacaccatggtccaagggaagggctgccctgtctgaagagtcccgcccacttgtaggatgagacgtggaaaatattgttgctgtaacttaaaaaacaagaccaggggggttggctgggagcaccggccagcaggccctgctgagcataaaccccctccactggagaaggcgtggcccctgcccacctggacccttctggaaatgagggaagtgctaacagcagtgcccatcccacaagcattaaactcgggaggtggagactctccagcagaaagctgggcagcagagtggtcctgcccctcggcccacaaagggccttggccgagcatgggcatgcctggtgtgtgcccactggggtccatccctgccagtggggttccagggacctcggggaccgggctgcttgggcccttggactctaggtgagccgtgagagcgggctggggcaggcggagcagctgcctgcagggcagggacacggtcaggggctacctcccggacaccctggcctctccacaggcagctatccatgatgctgatgctggcgcagtcaaacccgcagctgttcgcgcttatgggcacccgggcaggcatcgccagggagctggagcgtgtggagcagcagtctcggctggagcagctgagtgcggcagagctgcagagcaggaaccagggccactgggctgactggctacaggcgtacagagcccggctgggacagga

SEQ ID NO: 431 - DNA, 1524 bp, Homo sapiens
gaaatggtactcttttcatcatggtgatgcatatcaaagatcttgtgagtgattacaaagaatgatggttgtagaggaaacccttaccttggtaggaagcattactattaagggactgcttttttttttaggttactgaaaatggagctgacccaaatccatatgtcaaaacatacctacttccagataaccacaaaacatccaaacgtaaaaccaaaatttcacgaaaaacgaggaatccgacattcaatgaaatgcttgtatacagtggatatagcaaagaaaccctaagacagcgagaacttcaactaagtgtactcagtgcagaatctctgcgggagaattttttcttgggtggagtaaccctgcctttgaaagatttcaacttgagcaaagagacggttaaatggtatcagctgactgcggcaacatacttgtaaactagtgaatgtctgagctttggaagcatgaacagttataaacgtgcatgcatacatgcacacacacacagacacacacacacacacttgttaattttgtatagtatttttatacttggacagaacttataaagttaaatatacttgctgcatttcaacacatctgttggaccaacagtcacataactaacctttttgaatttttggaagccattgctgttttaaagtcattatgtagaatgctacaaaccctaaacttaatatatactaattcctgaaaaagactttgagacagtactatgtcagttcagccacctattttgcattgttttctataaggaggcaaagcatatgtgttttcctgttatgcaccttttatagcctttaccactgtgtaatgttcacaaacaccaaagtaaaggaaaaatgcaggatgttaccgtaaaatccagctgctattcatggagctgaaaaacaaagcacaaataatagatagctaagttaagaactactaagtagtttatagaagtagggaaaaacgtaatactgctttttattcatgtctttaaagcctttttcagaataagtgccaatcactgatgttgtaaataatggtgccttaactttatatgcttccctggcacttcgtttctgatttttttcctgatttgataaataattagtacatagttttcactcacttgcagcttactaaagacaagaaattatgtacatgtactaatgtttttcccacaaaaaaatcctttacttctgatgtatgaattagttatctaaatagttaagcctaatacctgaataagactcaccaatgtgattgtacaataaattctatcattccattaaaatcctacatttattcccaggaatggtaatttcacctccctacatctatactccactccctcagtaaataagtgaaaattgttaacccatgtgcccattcctgagtagggcagactcttcacaagaggcccatgacaagaattctagggtccagattgaactttaatatagacctttgtctgtgtagaccagtttgtcttgtaaactgtcttacttatgt

SEQ ID NO: 432 - DNA, 1908 bp, Homo sapiens
gtctctatggaattatagctcacctacttttgggggaatcatgtaaggtaattttatttcattatgtattactagaatgtattgttttaaaatgtgtctacttttttgaagtgtcattttgttgttgttttcattgagatggggtcttactatgttgcccaggctggtctcgaactccgaacctcaaatgacctgcccggctcggcctcccaaagtgctgggattatgggcatgagtcattgcatccagacaaaagtgtcattgtttaatcttgatttgaaagaactttaggtatttaaaacattatgtggttcttttgtgcaagcgctttatccctaagtcgtttgattatccagggttgaaagcaactctctctgacttctgcactcagaaagcgcttggtctaattgtgttctccttcctgtctcttagcttcacaggataatgcagctggctgtggttgtatcacaagtacttgagaatggttcctcagttttggtctgtttggaggaaggctgggacatcactgcacaagtgacatccctggttcagttactcagtgatcccttttataggacacttgaaggcttccagatgttggttgaaaaagagtggctctcttttggtcacaaattcagtcagaggagcagcttgaccctcaactgtcaggggagtggttttgctccagtcttcttacagttcttagactgtgtacaccaggttcacaaccagtatccaactgagtttgaattcaatctctattacttaaagttcttggctttccactatgtgtctaatcgctttaaaacatttctcctggattcagactatgaaagattagagcacggaactttatttgatgataaaggagaaaagcatgccaaaaaaggagtctgtatttgggaatgtattgacagaatgcacaagaggagtcccattttctttaattatttatattcaccattggaaatagaggctctaaagcccaatgtaaacgtctctagcctcaagaagtgggattactacatagaagagaccctgtccacaggcccttcctatgactggatgatgctaacccccaagcacttcccctccgaagactctgacctggctggagaagctgggccacggagccagaggagaacagtgtggccatgctatgatgatgtcagctgtactcagcctgatgctctcaccagccttttcagtgaaattgaaaaattggagcacaaattgaaccaagcccctgagaagtggcagcagctgtgggaaagggtaaccgtggaccttaaagaagaaccaagaacagatcgctcccaaagacacctgtcgagatccccaggaattgtgtctaccaacctaccttcctatcagaagaggtctctgctacatctcccagacagcagcatgggggaggaacagaattccagcatctccccatccaatggagtggagcgaagagcagccacgctctatagccagtatacatccaagaatgatgaaaacaggtcctttgagggaacactttataaaagaggggctttgctgaaaggttggaagccccgttggtttgttttggatgtaacaaaacatcagctgcgctactatgactcaggtgaggacacaagctgtaaaggccacattgatctggctgaagtagaaatggtcatccctgctggccccagcatgggagccccaaagcacacaagtgacaaggctttctttgatctcaagaccagcaaacgtgtgtataacttctgcgcccaggatggacagagtgcccagcaatggatggacaagatccagagttgtatctctgatgcctgatgcccatggtcaacccacgcagaagaaacagaagaactcatgctgccagatagatagaacaagaagcatggatccttgagg

SEQ ID NO: 433 - DNA, 1714 bp, Homo sapiens
ttttttttttttgacaagtttgcaagttttattgaattaatggctggctttcacagatgttaatcactggcgggcggttgaatagggggaacaggaaaatgctctccagaggttcccactgaagccctttcatctgccctgccccaacccaccactgaagccagaggtcatgggagttgggatctaactacactctgtgaacttaccaccacccattccatccccaagcccatattttatttgggactaggccactgatgcccgggcccttcctcttccagtagggtgggagggtgggaggtggggacacggaccaaccctcaaggaaagaaaagaggttaaggtggggggttttgctgaatgtctaagaaatgtcagtggaacagggctggggcacggtggctcacgcctgtaatcccagcactttgggaggccaaggcaggtggatcacctgaggtcaggagttcgagaccagcctggctaacatggtgaaaccccatctctactaaaaatacaaaaattagccaggcgtggtggcaggtacctgtaatcccagctacttgggaggctgagacacagtctcgctctgtggcccaggctggatggagtgcagtggtgcaatctcggctcactgcaacctccgcctcccgggtttaagcaaaattatcctgcctcagcctcctgagtagctggattacaggcaggcaccaccacgtccggctaatttttgtatttttagtagagatggggttttgccatgttagccaggctggtctcgaactcctgacctcaggtgatccgcctgccttggcctcccaaagtgctgggattacaggcgagagccaccacgcccagcctctgcttcgtgagttttctttcccctgaggcaccctctgagttctccacgtgtcagacccatgtccaatgcaccacgctccttccttcacaccatgaaagccccgaagtaagaccgggtaccatcacgcagtcgaaccaggcgttcatccagcacacggacgaccacctcctccccagcctccaggtgtaccacaccacccaggaagctgctgtcccaccagacccgggagctgctggtggcccgtccgcagggtgactgctggctgaccaacagctccagctcctcggggtagcggggtgtgcgcttgtagaggccgtgggtgatggtgctggccaggcccagcgggcagcccacaccgcccagctgcaccttggagtagatgtagtagtagccagctttggtgaccacaagggccccatcgtggtagctgaggcccctcaggaaggccaggcccagctgagtctcccataacagcggccccccgctgccggtcaagctggagttggcccctgtgagatgcgctgctgggttgacctcgtgagaccttcgctcttgtatcagctgctcccaggagcctgcaggtccgtcaggcaggcgggtgaccatctctcctagacgccagtgcagctgcaggaggaaccagccttggacggccagcccagcccccatcagcaacagcaagagacccagacccacccgggccacactgcacgactgtctccggtggcttcgtcccagcctcgtgaatgggatgtcggtctgtccatccaccacaaacactgagggccgtacgacactctcctccatgcccaaggtctctggagcagggctgacacgcctgggtccttcaacctc

SEQ ID NO: 434 - DNA, 478 bp, Homo sapiens
tttcgtcagagatagcagagcgccgagttggggccacgaaggcgtgaggggagtcgtcgtccctcctgcacgaaagcgtctaagccttggcgacgccgccctgggggacccacgtcaggcctgggatagggaccgctgtccccgggtccctaccaatgtcgcccgtcgctcccggcccagctctacccgcagagtctgatggcagcggccactctgaggacgccaactcaggtgagtgcggcgtcttcccgtcctcacacaccttcccccacccacgttctaaagccatcagtgaggggcgcctgctcgagtccccgctgcccagggtcggggacactgaggcgttcgtgggtggggccctttttttgacactgcgtgtgacgaggtgtgggagagcgtgacaggcggaggaaccggcgcgtgcaaaggttgaggcgcgactgagccaggagaattcggaaagctgttttctgcaggc

SEQ ID NO: 435 - DNA, 1893 bp, Homo sapiens
cagcagcgcgcaggtcctcaccatagctctggtggccacctctgtcccgccatgctgctcaccgacagtggccagggcccacagcaccaagaggcttgggccacaaagtaaagggtcgcggagcctcgccggccgccatgtggagctgcagctggttcaacggcacagggctggtggaggagctgcctgcctgccaggacctgcagctggggctgtcactgttgtcgctgctgggcctggtggtgggcgtgccagtgggcctgtgctacaacgccctgctggtgctggccaacctacacagcaaggccagcatgaccatgccggacgtgtactttgtcaacatggcagtggcaggcctggtgctcagcgccctggcccctgtgcacctgctcggccccccgagctcccggtgggcgctgtggagtgtgggcggcgaagtccacgtggcactgcagatccccttcaatgtgtcctcactggtggccatgtactccaccgccctgctgagcctcgaccactacatcgagcgtgcactgccgcggacctacatggccagcgtgtacaacacgcggcacgtgtgcggcttcgtgtggggtggcgcgctgctgaccagcttctcctcgctgctcttctacatctgcagccatgtgtccacccgcgcgctagagtgcgccaagatgcagaacgcagaagctgccgacgccacgctggtgttcatcggctacgtggtgccagcactggccaccctctacgcgctggtgctactctcccgcgtccgcagggaggacacgcccctggaccgggacacgggccggctggagccctcggcacacaggctgctggtggccaccgtgtgcacgcagtttgggctctggacgccacactatctgatcctgctggggcacacggtcatcatctcgcgagggaagcccgtggatgcacactacctggggctactgcactttgtgaaggatttctccaaactcctggccttctccagcagctttgtgacaccacttctctaccgctacatgaaccagagcttccccagcaagctccaacggctgatgaaaaagctgccctgcggggaccggcactgctccccggaccacatgggggtgcagcaggtgctggcgtaggcggcccagccctcctggggagacgtgactctggtggacgcagagcacttagttaccctggacgctccccacatccttccagaaggagacgagctgctggaagagaagcaggaggggtgtttttcttgaagtttcctttttcccacaaatgccactcttgggccaaggctgtggtccccgtggctggcatctggcttgagtctccccgaggcctgtgcgtctcccaaacacgcagctcaaggtccacatccgcaaaagcctcctcgccttcagcctcctcagcattcagtttgtcaatgaagtgatgaaagcttagagccagtatttatactttgtggttaaaatacttgattcccccttgtttgttttacaaaaacagatgtttcctagaaaaatgacaaatagtaaaatgaacaaaaccctacgaaagaatggcaacagccagggtggccgggccctgccagtgggcggcgtgtgctagcaaggcctgccgggtgtgccgcagtcaccacagggttctgagaacatttcacagaagtgcctgagacgcggagacatggctggtgttaaatggagctattcaatagcagtgacgcgctctcctcagccaccaaatgtccctgacaccctccccagcccccacagataacatcagctgaggtttttttcagtatgaacctgtcctaaatcaattcctcaaagtgtgcacaaaactaaagaatataaataaaccaaagaaaggtgaaaaaaaaaa

SEQ ID NO: 436 - DNA, 1968 bp, Homo sapiens
ccttgcttgcaggaagccatgcagttagtttctgcagttagtcgtgtgaggctaggtggttgggcaggcctcgggctgtaggtgttgggtgggaaaaagacccaagggcctgaaagggagggaaaggggagggtagcgggagggtagcaggtgagttcctagggctggaaggtttaacagcagcctggtgcagtgccctgtcatcaagacaaacccacggtcctcctgggtgcctaccaagcttggtttgtacaaaagcaaggtgggagtctatttttgtacatgagatacatcacacttacctgtgggccagtattgtgaagtgagtctgagttgtttacactgatgccttccctgcccaccacaaattgtgtacatagtcttcagatgataccacccctttccccagctcccaaccaagagctggttctaggcctgtgttatatgtcatatttagcgtttttatatatgacctttgatttctgttgtttgtattttagcacagtgtatgcaccttcatttaaatacatctgtgtgcatacagatacgcatatatgtgtgtgcgtatgcatatatctctcatctgtagtttccaagagttcagctgaagcagatggagtcctgcagcccaggagacaccctgcatccctgctaatagtgtttgccacaagtattagtgagtcttccttattaatattttcatttcagaagactgaagcaaagctgatagtgtttgctgtttctttggcagctaagtgagggtcttgggatgacttgctgtgttcctcaagctgcactttggggccatctctgcagtattagccccctttttgcttggtggtactctgtctgtgcctgtgtgtgtgtgtgatagtcactcttgcatggcttccatgtctggtttgtggcatttggggataaggtgctgaagccagagcatttgcagtttgtttgaggcctcgttgccaatgatagatcactcctgttgacctggtatgtctgcttgcttgctgcttttccttgctttctcttggaagaggaaaggactctggtcaggcccaggctgagtgagatgagctgcagctggctcatggccttcttagagcagagagaggagtatgtcattttactaagttcctaaacaaacatttatgcaggcaacactccttgcagatccagaaactgaggcacaatagggttatgacttgctcaagaatatgtagctgctagggggtaaatcaaggcatcacaatttctgttcagcgggcaggaataggctgtgaattgctagcactttttttttttaagcaattactttttgacttgttcctctgaaagggcaagaggcgtacacctttcccaaatgtaaactaaaatctgcaggatgccacccactgtatagttctgctttcccagagaggaagaacttttagaaaccaaatgatcttaattgttattgcccacccctggcttttccgggtagaaaattcacagtaggaatgattgttaagagagagtgcttggaaccatgggttaacaggaaaggctacctaacttcacatatctgcaaccagagcagccaccaagcattacttagcagcaggaaaatgattgtatttgagttcctgtgtgtccaaaactgaggcaccatgttctttgaaaacatgccacctcaaggctgggcgcggtggctcacacctgtaatcccagcactttgggaggccgaggcgggcggatcaccggaggtcgggagtttgagaccagcctgaccaacatggagaaaccccatctctactaaaaatacaaaattagccgggcgtggtggcatgcgcctataatctcagctacttgggaggctgaggcaggagaattgcttgaacccaggaggcggaggttgcggtgagttgagatcgtgccattgcactccggcctgggcaacaacagcaaaactccgtctcaaaaaaaaaa

SEQ ID NO: 437 - DNA, 422 bp, Homo sapiens
ttttttttttttgaggcagagtctcactctgtcacccaggctggagtgtagtggcgcaacctcagcctctccaagtgctgggattacaggcatgagccaccactcccagccaatagtgaattttctaagagcatgtatccctatcagtaagtaacagggatacatgaagatacttataaaatacagaaaaactgcccagcaaatcagggccctaaacagttggtagattccataaattcaactggctaccatgtatagccctcactgtaaggtaggtggttaggtttctagagagcattagtcttagaattatgaagagccatattaacccaaatgatttctaaatttagatatatattttccctgctacataaaaactctgggtaataactagaaatagacccacaatttagagacaatgt

SEQ ID NO: 438 - DNA, 1319 bp, Homo sapiens
aggcagcacgcggaggagcgcggccgccgcaaccccaagacggggttgaccctggagcgtgtgggccctgaaagcagcccttacctcctgcggcgccaccagcgccagggccaggagggcgagcactaccacagctgcgtgcagctggccccgacgcgaggcctggaggagtctgccacggccccctgagcttgccggtggccctcgggtgggcggggtggcgccgcggccactgaagcaccgcgcatggagtggaaagtgaaggtgcgcagcgacggaacccgctacgtggccaagcggcccgtgcgagatcggctgctgaaagcccgtgccctgaagatccgggaggagcgcagcggtatgacgaccgacgacgacgcggtgagcgagatgaagatgggccgctactggagcaaggaggagcggaagcagcacctgatccgggcccgtgagcagcggaagcggcgcgagttcatgatgcagagccggctggagtgcctgcgggagcagcagaatggcgacagcaagcccgagctcaacatcattgccctgagccaccgcaaaaccatgaagaagcggaacaagaagatcctggacaactggatcaccatccaggagatgctggcccacggcgcgcgctccgccgatggcaagcgggtctacaaccctcttctctcagtcaccaccgtgtgagctgcccgggcgggtacacggcccaggcccagggaaccccctggggccccggccctcactctcctatagagattgtgtgtgtgtgtgtgtgcgcgcgcgcgtgctcgctgtgcgcacgcacacatctcgtctgggtgtgcgcacagggctttgttagcagagagaagcccctgaggagaagggacgcttttcttccttctgcccaagtaaagtgaccatgccagtggccagcactgggggcacacctgtgatgggcaccccttcagctgtgcgtgtgcattccccatcccccatgctcttgcgtgtgcttgcacgtgcacgcacacacacacccagtgctctctccacccgacccgtgtacttgcagacagggaagctgagctgaaaggagcacaagagagtgtccggcttcgctgctgagcgcggcctctccccgccgctgcgcactgcagttatttgtagacaaaggcacccctgatttttgtggtttttctccctttctgtgcttgccaatagttgttttgttttgtggacctgccctgggggctggcagctccttcaggcagcctggcagaagtggaactcccctctccactgatggctgggaagggagttggggaggaaga

SEQ ID NO: 439 - DNA, 1689 bp, Homo sapiens
gagcgatcgaggctgcagcgcggccgccgggcgcaacatgactgccgtcggcgtgcaggcccagaggcctttgggccaaaggcagccccgccggtccttctttgaatccttcatccggaccctcatcatcacgtgtgtggccctggctgtggtcctgtcctcggtctccatttgtgatgggcactggctcctggctgaggaccgcctcttcgggctctggcacttctgcaccaccaccaaccagagtgtgccgatctgcttcagagacctgggccaggcccatgtgcccgggctggccgtgggcatgggcctggtacgcagcgtgggcgccttggccgtggtggccgccatttttggcctggagttcctcatggtgtcccagttgtgcgaggacaaacactcacagtgcaagtgggtcatgggttccatcctcctcctggtgtctttcgtcctctcctccggcgggctcctgggttttgtgatcctcctcaggaaccaagtcacactcatcggcttcaccctaatgttttggtgcgaattcactgcctccttcctcctcttcctgaacgccatcagcggccttcacatcaacagcatcacccatccctgggaatgaccgtggaaattttaggccccctccagggacatcagattccacaagaaaatatggtcaaaatgggacttttccagcatgtggcctctggtggggctgggttggacaagggccttgaaacggctgcctgtttgccgataacttgtgggtggtcagccagaaatggccggggggcctctgcacctggtctgcagggccagaggccaggagggtgcctcagtgccaccaactgcacaggcttagccagatgttgattttagaggaagaaaaaaacattttaaaactccttcttgaattttcttccctggactggaatacagttggaagcacaggggtaactggtacctgagctagctgcacagccaaggatagttcatgcctgtttcattgacacgtgctgggataggggctgcagaatccctggggctcccagggttgttaagaatggatcattcttccagctaagggtccaatcagtgcctattcttccaccagctcaaagggccttcgtatgtatgtccctggcttcagctttggtcatgccaaagaggcagagttcaggattccctcagaatgccctgcacacagtaggtttccaaaccatttgactcggtttgcctccctgcccgttgtttaaaccttacaaaccctggataaccccatcttctagcagctggctgtcccctctgggagctctgcctatcagaaccctaccttaaggtgggtttccttccgagaagagttcttgagcaagctctcccaggagggcccacctgactgctaatacacagccctccccaaggcccgtgtgtgcatgtgtctgtcttttgtgagggttagacagcctcagggcaccatttttaatcccagaacacatttcaaagagcacgtatctagacctgctggactctgcagggggtgagggggaacagcgagagcttgggtaatgattaacacccatgctggggatgcatggaggtgaagggggccaggaaccagtggagatttccatccttgccagcacgtctgtacttctgttcattaaagtgctccctttctagtccttaaaaaaaaaa

SEQ ID NO: 440 - DNA, 1574 bp, Homo sapiens
ccagatcctgcccaacctctatctgggcagtgcccgggattccgccaatttggagagcctggccaaactgggcatccgctacatcctcaatgtcacccccaacctcccaaacttcttcgagaagaatggtgactttcactacaagcagatccccatctccgaccactggagccagaacctgtcgcggttctttccggaggccattgagttcattgatgaggccttgtcccagaactgcggggtgctcgtccactgcttggcgggggtcagccgttctgtcaccgtcactgtggcctacctcatgcagaagctccacctctctctcaacgatgcctatgacctggtcaagaggaagaagtctaacatctcccccaacttcaacttcatggggcagttgctggactttgagcgcagcttgcggctggaggagcgccactcgcaggagcagggcagtggggggcaggcatctgcggcctccaacccgccctccttcttcaccacccccaccagtgatggcgccttcgagctggcccccacctagggccccgtggccggcaggccggcccctgccccacccccacccacgggtgtccctgcccactcgtgtggcaagggaggggagggcaggagggctcggcctgagcagggtgctggggggagagcgcaatacctcacgcgggctgccgtcctaatcaacgtgcctatggcgggaccacgctcggagcctgcctcttctgcgactgttactttttctttgcgggatgggggtgggggttccctctccaggtggttgtccaggcccaggtcccggccctgggtgctcagccagctcggctaggccctgcgcctccctgcgcttcccccttcaggaagggtgtgtgccacctcgttgcactggatcccagtggctgcttgggggagaggcgtttgccatcactggtgttgtcacctccctgtttctccaccaagggcttgggcctctcggggctggggcctcccaggggatggggacccagaggtgcagtggccgcccacatccatggcctaggagctactgggcaggttcccggccacacatctggtgggctgttttgttttttttttttcctcttcccccaaatgtcttgacgggatcactggggctctttgtgagggaggggggccaaactaccgccggaggaaatggggtctcagagcgagagctgcggagggggaggggaaaaaaaaggcctcacttttgctgcctgcggggccccacacagccgctgctactttggggggtgggggaaggggccaaagctgaagacacacacagtcattcatttctgtccaacacccctgtgggtggcgggtgtgccgtgtgtgtgcttgtgtgtgcgcacgtgtcggcgctcacacacacatgctagcccactgatgcacccagcccagggctggcagtctttgcagcgtggggccgtctcaccctggagcctggagaggatctatgcttgtttgtttttgtaatccatatcatagttgctttctttaattgttccttctgaataaacagtttatttaagataaaaaaaaaa

SEQ ID NO: 441 - DNA, 1102 bp, Homo sapiens
tttttttttaaaaaaaaattaagctctttaattatgtgcacacagattttagaaaaggtagccttttgtatatagatacctttacattctttaggctgacttttaaattgtcatcttttttcaactacagtttttgtatatagtaaaccagaagatgtgtatggaccctgttatggccaagcatctcaaagatgaagagagaattaatgatagttatatttcactcaaaatgccaaaaaaaaaaattcaacaaagtaaaaattttaaaacttgactctaactagttcctttttgttttacattctcaaaccattgtcaaatattctaaatatctctgagaatttctcttttaatgcttcacttgtataatcttaaaatcctgacagtcatacaatacagcatgtagtaggtaccttttcttgaggcacattcaagtgttttggcaaacagtaaaaagtatctaaatgccacaggttaaaatgtcaagttttactgagtcaccaacttcacctcttttgatctgcctgttctccaagaacatcattctccggaagatccaagttcctctagttgttttctttgtgttgtttccagttcttctagtcttttgcgaagtagagagagttccctttgatgttgttcctcctgcatatgaggaggaaatggtagttccatgcttggaacccatggctgatgactgaaagctaacaggattgatagatgctgttggaggcatgttaggaaccaaaattagacttcgaaattcattatgtcttctctgtatatcttttagtcttttttgaagccttgtatagtcttcaaaaggaacattttgtctatttaagacctgattttctgtttccaattcttctttctttgcctccaagacttctactttctcttgtagtcttttcaatttgttttcatgaagagattttctctaaaaagagaaatatgaacaagtatgttaatacataatctcttatttgaacaaaactatatagaaaatattttactcaccaaaaactgtgtttagatatgaatgttttcagtgaatactagaaacaaaggttagtagacatggctcttactgaaaattgca

SEQ ID NO: 442 - DNA, 1049 bp, Homo sapiens
ggaaggcctggtgcaggagcctctgagctctttccttctgtgaccacggacctgtcagtttccaaacaaaacgcgtgcctcacttgtgtggattttgtcactgtgcatgtatgtatgggtttctggggcattggtcctggtgctctctccacatcctgcatcccgtaccctctgtctcatggcccaggcagtgtgaaggcggagatgctgcacatgtacagccagaaggacccgctcatcctctgtgtgcgcctggccgtgctgctcgcggtgaccctcactgtgccagtcgtgctgttccctatccgccgggccctgcagcagctgcttttcccaggcaaggccttcagctggccacgacatgtggccatagctctgatcctgcttgttttggtcaatgtccttgtcatctgtgtgccaaccatccgggatatctttggagttatcgggtccacctcagcccccagcctcatcttcatcctccccagcatcttctacctccgcattgtaccctctgaggtggagcctttcttatcctggcccaagatccaggccctgtgctttggagtcctgggagtcctcttcatggccgtcagtctaggctttatgtttgccaactgggccacaggccagagccgcatgtctggacactgatcaggccctgctggcccaggtccctgtgcgcatgcacatggaggggtcagggccgctccctagggtccctcctgcccaacatgtggaggtggctggttcccatgaacgtggttgtcagaggcgggggacagcagaggctgcagactggcccacttccctcctccccagggatgccaagcttggatcatggccctaatcccaaccccaaccccatgggaggaggaggaggaggaagaagaggaggaggaggaggaggaggaggaggaggaggaggaggccaggtcctggtggagcctttgcccagcccagtcctctctgcctcctcctggctgaagctgtttgtccaggattaccctcggggctaaagaggaaaaataaagatgttgagctaccaa

SEQ ID NO: 443 - DNA, 458 bp, Homo sapiens
gaattcatgacttaacgtcagttagtattgcttaatggaatcgacatacatattgttataccgtgaatcattttcagtcaagaccacatttctcagagtttgccaaaacaaaccttctgccttcgggttgtcaggccactggaggatggagctcttacagatccgctgccgtagcctcaaatactgagaatgctgtaacactggctccagcaggataaatataatcacatccatgttctcatccattagcctctgcaaagccaagtaaaaagctgttttaaagttccagctttttgcatattttttggttaaaacaaatactgttttcttgctttggttgatgctctgcatgaggttgtcgatgatggccaatcccgggtcccaatccctctcctctagacaaaggagaacgtttttgtctcggctctcttcaaggtggtagcgcagctcatttatca

SEQ ID NO: 444 - DNA, 1681 bp, Homo sapiens
ttttttttttttgggctagaggtttgggctttaatggcagctggggtaaaaggaaacaaaaacagtaattctgaagagcacagggaacaggcagccaggaccagcctggcccattccaggccagctgagctgaaatgctgattctgtccagggggctgctgtatgtgtagactggtggcagtcttggggactgaggcctcttggagagaagggaagactgtcggctcagaagtccatggagctgtgggccaggtagtccttgcgaccgatgttgctgacctgcttggtctgcatagcctcgagtttggggcagtcagtgatccgatgacccaggcccccgcagaaggcacagccgcgctctcctccaatgtccagcatggactcatccccgcaatgcagcacctgcagcacgggcggcaccttctgcttggcttctagcagcagcgctttgaggtccatcagcactgactcatcacacgctttgttgatgaaggtagtggcgatgcctgtgtttcccgagcgcccggtgcggccaatccggtgtacatagttctcaatctcctctggcatgtcataattgatgacgtgctggatggcagggaagtccaggcccttggaggcaacgtctgtggctactaggacatccttcttgccctcccggaatgcctcgatggccttagtccgttcctcctggtctttgcccccatggatggctacggcctcaacccccttgagcagcaggtactcgtggatggcgtccacgtctgccttcttctctgcaaagatgagtacaggcgggggtgtcttctgcaggcactcgagcaggtacaccatcttggcctcctccttcacatattctacctcctggatgacatccaggctggcagccccagcgcgccccacattgatggtcacaggctttacaagggcactcttagcaaagttctgaatcttcttcggcatggtggcactgaagagcagggtctgtcgctggcccttgaagtaggagaagatggtacggatgtcaccctcgaagcccatgtcgatcatgcggtcagcctcgtccagggccaggtagcgacagatgtctaggctgaccatcttcttctgcagcaaatccatgaggcgccccggggtggccaccatcatgtgtacaccgtgtcggatggtctccatctgctctttcacggacatgcccccaatgcagagggcgcagcgcaggagtggtgagctgtcctcctgcagcaggcggcagtagtactccaggatgccatgggtctgccgggccagctcccgcgaggggcagatgatgagtccatagggcccctcgcgctttgagaagggtaacctcttctcttgttccaggcagaacatgatgacgggcaacgtgaacaccagtgtcttgcctgaacccgtgaaagcgatgcctatcatgtcacggccagatagaatggtggggatgccctggatctgaatgggtgttgggtggtgaatgcctttcttcttcaggcctctcaggatggctgcaggaaacttcatttccttgaagctcttgatgggtggtgggataccgtctccctccaccaggatgtggtatttcttccgcacgcgctcatgtcgctcttcagacatgctcagaacataacggggtggagtccagctggttttgatggggtcatca

SEQ ID NO: 445 - DNA, 621 bp, Homo sapiens
atcgagaccacccagcccagtgaggacacgaatgccaacagtcaggacaacagcatgcaacctgagacaagcagccagcagcagctcctgagccccacgctgtcggatcgaggaggaagtcggcaagatgcagccgacgcagggaaaccccagaggaaatttgggcagtggcgtctgccctcagccccaaaaccaataagccattcagtgtcctcagtcaacttacggtttggaggaaggacaaccatgaaatctgtcgtgtgcaaaatgaaccccatgactgacgcggcttcctgcggttctgaagttaagaagtggtggacccggcagctgactgtggagagcgacgaaagtggggatgaccttctggatatttaggtggatgtcaatgtagatgaatttctagtggtggaaaccgttttctaataatgtccttgattgtccagtgagcaatctgtaattgatctataactgaattccagcttgtcacaagatgtttataaattgattttcatcctgccacagaaaggcataagctgcatgtatgatgggttactatcaatcattgctcaaaaaaatttttgtataatgacagtactgataatattagaaatgataccg

SEQ ID NO: 446 - DNA, 468 bp, Homo sapiens
taacgatcgcttctctgcttgctacttcaccttgaaactcaaggaagcagctgttagacagcgtgaagccctaaagaagcttaccaagaatatagccactgactcatatatcagtgttaacttgagagatgtctatgcccggagtatcatggagatgctgcgactgaaaggcagagaaagagcaagtactaggagcagcgggggagatgatttctggttttgaattaattttcaatttatttacaaaagctatgtacaattaactaaaatgataaagcagtgatgtggatttctgtattctgatgatgagtctcttcagagtactgctcatcttaattaatttttgctgatatattgcttcatctactagaatatttcacatcacctataacaactgcacagtgttctgacacatttgagtgtccaaaatagccaattaacacaaccaaatacaactgggcatgtatt

SEQ ID NO: 447 - DNA, 1030 bp, Homo sapiens
ctttactgtcttcattctgggaataactattcgaccactggtggagtttcttgatgtcaagaggtccaataagaaacaacaagctgtcagtgaagaaatctattgtcggttgtttgatcatgtgaagactggaattgaagatgtttgtggacattggggtcacaacttttggagagacaagtttaagaagtttgatgataaatatctgcggaagcttttgattcgggaaaaccaaccaaagtcaagtattgtatctttatataaaaagcttgaaataaaacatgccattgagatggcagagactgggatgataagtactgtccctacatttgcatctctaaatgattgtcgtgaagaaaaaataaggaaggtcacgtccagtgaaactgatgaaattcgagaactcttatcaagaaatctctatcaaatccgtcagcgaactttatcctacaacagacacagtctgacagccgacacaagtgagagacaagccaaggagattctgattcgccggcgacacagtttgcgagaaagcattaggaaggacagcagcttgaatcgagaacacagggcttccacttcaacctcccgatatttatccttacctaaaaatacgaagcttccagaaaagctacaaaagaggaggactatttctattgcagatggcaatagcagcgactcagacgcagatgccgggaccaccgtgctcaatttgcagcccagagccaggcgcttcttgccagaacagttctccaagaaatccccccagtcctataaaatggaatggaagaatgaggtagatgttgattctggccgagatatgcccagcacccccccaacaccccacagcagagaaaagggcacccagacgtcaggcttactacagcagccccttctctctaaagaccagtctggctcagagagggaagacagtttgactgaaggcatcccgcccaagccgccaccacggctggtctggagggcatcggaacctggaagccggaaagcccgatttgggagtgagaagcct

SEQ ID NO: 448 - DNA, 1936 bp, Homo sapiens
ggcacgaggaggcctcggggctgtccgtgtggatggggaagcagatggagcccttgcacgcagtgcccccggcagccatcaccttgatcttgtccttgctcgttgccgtgttcactgagtgcacaagcaacgtggccaccaccaccttgttcctgcccatctttgcctccatgtctcgctccatcggcctcaatccgctgtacatcatgctgccctgtaccctgagtgcctcctttgccttcatgttgcctgtggccacccctccaaatgccatcgtgttcacctatgggcacctcaaggttgctgacatggtgaaaacaggagtcataatgaacataattggagtcttctgtgtgtttttggctgtcaacacctggggacgggccatatttgacttggatcatttccctgactgggctaatgtgacacatattgagacttaggaagagccacaagaccacacacacagcccttaccctcctcaggactaccgaaccttctggcacaccttgtacagagttttggggttcacaccccaaaatgacccaacgatgtccacacaccaccaaaacccagccaatgggccacctcttcctccaagcccagatgcagagatggtcatgggcagctggagggtaggctcagaaatgaagggaacccctcagtgggctgctggacccatctttcccaagccttgccattatctctgtgagggaggccaggtagccgagggatcaggatgcaggctgctgtacccgctctgcctcaagcatcccccacacagggctctggttttcactcgcttcgtcctagatagtttaaatgggaatcagatcccctggttgagagctaagacaaccacctaccagtgcccatgtcccttccagctcaccttgagcagcctcagatcatctctgtcactctggaagggacaccccagccagggacggaatgcctggtcttgagcaacctcccactgctggagtgcgagtgggaatcagagcctcctgaagcctctgggaactcctcctgtggccaccaccaaaggatgaggaatctgagttgccaacttcaggacgacacctggcttgccacccacagtgcaccacaggccaacctacgcccttcatcacttggttctgttttaatcgactggccccctgtcccacctctccagtgagcctccttcaactccttggtcccctgttgtctgggtcaacatttgccgagacgccttggctggcaccctctggggtcccccttttctcccaggcaggtcatcttttctgggagatgcttcccctgccatccccaaatagctaggatcacactccaagtatgggcagtgatggcgctctggggaccacagtgggctatctaggtcctccctcacctgaggcccagagtggacacagctgttaatttccactggctatgccacttcagagtctttcatgccagcgtttgagctcctctgggtaaaatcttccctttgttgactggccttcacagccatggctggtgacaacagaggatcgttgagattgagcagcgcttggtgatctctcagcaaacaacccctgcccgtgggccaatctacttgaagttactcggacaaagaccccaaagtggggcaacaactccagagaggctgtgggaatcttcagaacccccctgtaagagacagacatgagagacaagcatcttctttcccccgcaagtccattttatttccttcttgtgctgctctggaagacaggcagtagcaaagagatgagctcctggatggcattttccagggcaggagaaagtatgagagcctcaggaaaccccatcaaggaccgagtatgtgtctggttccttgggtgggacgattcctgaccacactgtccagctcttgctctcattaaatgctctgtctcccgcggaaagctcc

SEQ ID NO: 449 - DNA, 354 bp, Homo sapiens
ggcacgagctggaaaacaattggcttcaacatgagaaagctcctacagaagaagggaaaaaagagctgctggccctaagtaacgcgaacccctcgctgctggagcggcactgtgcctacctctaagccaagatcactgaatgagcggacgactgaggacatatgctttaagctcgacccattcccatagcgacgctcatcactctgcttgcatgctcttcaaccctcagctgtcggctctcgagctaccccctcaatgtcatgcggcctccttcccatccgcccttcctcgccgctgctcagtactccgcgttaggagaccttcgtacttagcggcccgctccagagtaccgcc

SEQ ID NO: 450 - DNA, 1073 bp, Homo sapiens
ggaaacatcatctacatgtacatgcagccaggagccaggtcttcccaggaccagggcaagttcctcacgctcttctacaacattgtcacccccctcctcaatcctctcatctacaccctcagaaacagagaggtgaagggggcactgggaaggttgcttctggggaagagagagctaggaaaggagtaaaggcatctccacctgacttcacctccatccagggccactggcagcatctggaacggctgaattccagctgatattagcccacgactcccaacttgcctttttctggacttttgtgaggctgtttcagttctgacattatgtgtttttgttgttgctcttaaaattgagacggggtctcactctgtcacctagggtggagtgcagtggtgccaccatagctccttcgactattgggcttaagcgatcctcccccacctcagccttccaagtaactgggactacaggtgtgcatcactggcagtgggaattgtggcttttctgtcttctatggagacggggtcttgcctgtgttgccccaggctggtcccaaaccccctggcctcatgtgatcctcctgccatggcctcctaaagttctgggattacaagtgtgagtcactgtgactggccaacattatgtgatttatgtgtgaacctatataacacaaatcatcccccaaaaccccatcctggatctgtaaagcagctgccaaagaatgaagtgagagaaacagttgtaaagatgagtttcccaccctacttatacccagagtgcctaagaggaaatcaactcttcctcaatcagagctttgcctttgtttgttgttgtttgcctttaaagtctaacacacctgacatgtttcagtcagaatgaccccaaatgcatcactgttctccacgtggtcccaagtgcctctctgtttagggccatcaaatcatggaatgcagcacagtttgatattttctatattcccaattcctacccaaaccttttcatgaaatcgtagagtttgttttaccctttatctggtgtaagattctgcataaaccaagaagtgaacctgt

SEQ ID NO: 451 - DNA, 2674 bp, Homo sapiens
gcgcattgacccctagaacagcgctcgaattgccgcgtcgacccacgcgtgcgaacccacacaatggccagcgataccagcagcctggtgcagtcccatacttacaagaagcgagagccggccgacgtgccctatcagactgggcagctccaccccgccatccgggtggcagacctccttcagcacatcacacagatgaagtgtgcggagggctacggcttcaaggaggaatacgagagcttctttgaagggcagtctgcaccatgggactcggctaagaaagatgagaacagaatgaagaacagatacgggaatatcattgcatacgatcattcccgagtgaggctgcagacaatagaaggagacacaaactcagactatatcaatggcaattatatcgatggttatcatcgacccaatcattacattgctacccaagggccaatgcaggaaaccatctatgacttctggaggatggtgtggcacgaaaacactgcaagtatcatcatggtgaccaatcttgtggaagtgggaagggtcaaatgctgcaaatactggccagatgacacagagatatataaagacattaaagttaccctaatagaaacagaactactggcagaatatgtgataagaacatttgctgttgaaaagagaggtgtgcatgaaatccgagagatcagacagtttcacttcactggctggccggatcatggggtcccctaccatgccaccggcctgctgggattcgtgcggcaagtcaagtccaagagcccgcccagtgcaggcccactggtggtgcactgcagtgctggtgcagggaggactggctgtttcatcgtcattgatatcatgttggacatggccgaaagggaaggggtcgtagacatctacaactgcgtcagggagctgcggtcacggagggtgaacatggtgcaaacagaggagcagtatgtgtttatccacgatgcgatcctggaagcctgtctttgtggggacacctctgtgcctgcttcccaagttaggtctctgtattatgacatgaacaaactggatccacagacaaactcaagccagattaaagaggaattccggacgctaaacatggtgacaccaacgctgcgagtagaggactgcagcatcgcactgttgccccggaaccatgagaaaaaccggtgcatggacatcctgcccccagaccgctgcctgcccttcctcatcaccatcgatggggagagcagcaactacatcaatgctgccctcatggacagctataaacagccttcagcttttatagtcacccagcatcctttgccaaacacagtgaaagacttttggagactggtcctggattatcactgcacatccgtagttatgctaaatgatgtggatcctgcccagttgtgtccacagtactggccagaaaacggagtacacagacacggccccatccaggtggaatttgtctctgctgacctggaagaggacatcatcagcaggatattccgcatttacaatgccgccagaccccaagatggatatcggatggtgcagcaattccagttcctgggctggccgatgtacagggacacaccagtgtctaagcgctccttcttgaagctcattcgccaggtggacaagtggcaagaggaatacaatggcggggaaggccgcaccgttgtgcactgcttgaacgggggaggccgcagtgggacgttctgcgccatcagcatcgtatgtgagatgctccggcaccagagaaccgtggatgtctttcacgctgtgaagacactgaggaacaacaagcccaacatggtcgacctcctggatcagtacaagttctgctacgaggtggccctggaatacttgaattctggctgatggtgtaaacagctctgcaaacaatccctttcataccacaaagccaagacgttccatggtatttgtgcaaaagagatgaagacttctcaatatgcttattttgctttgcataattggctctttttaagagcccaagaaagtgtttctaaaattgcttgcactgcccaatcccagtaatgctgctgcctgacagaaacacacacacagccacagttgccaaatcccgtactccttgccaccggcttcctagagcagcgtagacagctggtaaactgaagagcacaactatattcttatgaaggaatttgtacctttggggtattattttgtggcccgtgaccctcgttattgttacagctgagtgtatgtttttgttctgtggagaatgctatctggcattatggtaatatattattttaggtaatatttgtactttaacatgttgcataatatatgcttatgtagctttccaggactaacagataaatgtgtaatgaacaaagatatgttgtatgagtcgtcgtttctgtcagatttgtattgtttccaagggaaaagcttgggggaggactcagttcacaaaatgcaaaactcaacgatcagattcacggacccagagcttttccatgtgtttatattgtaaatatttttgatttcatcgaaattatttattcattaaaagaaatttttgtgaagcacagtgagtgacaatcatttttcttaaggcctggaaacgattttctgtatgatgttactttatgtgaattctcatctcaataaatgatgacccgtg

SEQ ID NO: 452 - DNA, 601 bp, Homo sapiens
tttttttttttttcagcgggaaaaatgtggatttaatggaatgaaggatgaaagggcccgaagccagcaagtctcgccccacctaccagcccccacccagcttcccaagggtctcagagggacactcttggcactggcctttcacatctgttcaacaacccctgagctgaaaagttgcagtgggaggcctccagctcagcaggtggactccaaaatacccctcttgtcttatccactccaggtcgggggcagggaagcacatggggctgcttctgccacgttccctccacagccatccccaaggccaggcacacaggcaccatccaagggcctgccccctagcagtgagactctagctctgtgagtctgagcagtgaggtcctgggggtggcgggagccgagggtcctgctgggttccgctggggcaggtcctcggctgggcacatgagctgacggattctctctctgaaggggcccttgagggttccgagtctgtagaggctccaggcaggaatgcagaccatggaggacagagccaggagccagcccagggcatcgccccaccacgggtacgtgtacttcttgttgtaggtcagcggag

SEQ ID NO: 453 - DNA, 474 bp, Homo sapiens
cgacccacgcgtgcgggatcctatcgaaaaggattggtgcgactgggccatgattagcaggtaggggcagtgatggagggtggctcaggccagggggtggacctgctcattgcaggtagaccctgagtgagagtggggcactcttctccctgggtccaccccctctctcactcaagtcctcttctgcccctaggccttatagcaccctgcgagattgcctggagcactttgcagagttgtttgacctgggcttccccaatcccttggcagagaggatcatctttgagactcaccagatccactttgccaactgctccctggggcagcccaccttctctgaccccccagaggatgtactcctggccatgatcatagcccccatctgcctcatccccttcctcatcactcttgtagtatggaggagtaaagacagtgaggcccaggcctaaggggccacgagcttctcacaaccat

SEQ ID NO: 454 - DNA, 1838 bp, Homo sapiens
ttttttttttttatatttaaaaattaatttaatgcttggctaaatcttaattacatatataattatcaaacgatagtccttaatttccaaaaaaattcctcttttgaaaatccagaatcagaaagcataaacttttaaaccaagttcccctgaatatttacaatgtggtataaacattatagaagaccatggatattaaattgcctggggtgtggctaatcagcaaggcgtattctttattgcatatttaactcacatatgtgggattttaaatatgacagactactaaaattcaaatgcatgtatctgcaagctgggcagggagtaaaatcatgaatgagacaggacggtcagcccaaaaccatgcaattaggttgtgggtttattattttcaaaagtgaaatttctatgttccatttgaaactatgttgcatattcatttagcattcacattaaacccacatttgactctaacgctgattcaaggaagaaagttcaacattcactcaatgactaagtccacaactcaactctcaatgttaaggcagcacagctacagtgatagcaacgctaaccaaaaggtaatgaacatttagtcacttgccagcccttttgttacaacagtgtagtaatttccctaagacaatttgctaccggataattttctgctgttaaaaggcttcctctgtggaaaaacaccacaaatttccagtgtgaaagtaagtccatggtggtataaatatatatatgcataattacacaatttacactgcacacatcgtttacaggggacaattaactgagagggttaatttaaatgaccatacaaaatacttcagtaaacaaagtatgacaggcagtaaagaaaacattcatagactcctagaaataatctgaattcctttcattctgaagaaatatcatttaaggacacagtattgaatataatgttttttgtattaaaacaagaattgctattttacagtttaagaaactttacatatatacaaaatttacacattgggaatggtaatcaagcaaataggtttttcagtctcatagatctattttccttcgatcaaagacttaaattctttcacattgtggtcacttgcaacagacatagcatgatccaaagctcgaacacttgcaaggagttttactatctgttttatgttttcccttgcatttcttttttccacatcagaacacccgatactatttctataaattgtatccgctaagtgtacaaggtatcggcaaaagttttctaactgagaaatagtcctttctcctttcagattcatgaaccattgtttggggaaacaattgattacattttgggcttttttgatgctgtcatctccatattctgaattctgaaaagccatgagaatatatcgatttaataaaccatctattgataactcttgcagagttttatttgagaaaatgccataccactgaagaaaattgcctaacagcttaactgaagaccaaaactgtcgttgaaaaaacaagtaaggcccagaatttttattttctaagacatttttgggatataagggcataaatacatcatcatctaaagttcttctcattctcaataaaagtgcctttaggtatacctgtgtatttttattttctgcattcactactgaaggatatccattgattaattttagtgtaattcccaccattcttgaagtctgtgttgtagaaaaagggtcccacatattttcagctatcactgttagtttaggaagaatcaccttttccacaatggtaggtagtagggcaacatctacatcatctttttcttgctctcgttcttcaca

SEQ ID NO: 455 - DNA, 1790 bp, Homo sapiens
tgatccgatcttgcactccgtcactgtggctgactgcattgtcacattcacttggcggaggccaatttcctacaggtgctttcaggatcaggtcactgcgatggtctctaaacaccattctgctttctctgctctcttgtctttaggagccgggtgtgggctgagccctgcctgattgatgctgccaaggaggagtacaacggggtgatagaagaatttttggcaacaggagagaagctttttggaccttatgtttggggaaggtatgacttgctcttcatgccaccgtcctttccatttggaggaatggagaacccttgtctgacctttgtcaccccctgcctgctagctggggaccgctccttggcagatgtcatcatccatgagatctcccacagttggtttgggaacctggtcaccaacgccaactggggtgaattctggctcaatgaaggtttcaccatgtacgcccagaggaggatctccaccatcctctttggcgctgcgtacacctgcttggaggctgcaacggggcgggctctgctgcgtcaacacatggacatcactggagaggaaaacccactcaacaagctccgcgtgaagattgaaccaggcgttgacccggacgacacctataatgagaccccctacgagaaaggtttctgctttgtctcatacctggcccacttggtgggtgatcaggatcagtttgacagttttctcaaggcctatgtgcatgaattcaaattccgaagcatcttagccgatgactttctggacttctacttggaatatttccctgagcttaagaaaaagagagtggatatcattccaggttttgagtttgatcgatggctgaatacccccggctggcccccgtacctccctgatctctcccctggggactcactcatgaagcctgctgaagagctagcccaactgtgggcagccgaggagctggacatgaaggccattgaagccgtggccatctctccctggaagacctaccagctggtctacttcctggataagatcctccagaaatcccctctccctcctgggaatgtgaaaaaacttggagacacatacccaagtatctcaaatgcccggaatgcagagctccggctgcgatggggccaaatcgtccttaagaacgaccaccaggaagatttctggaaagtgaaggagttcctgcataaccaggggaagcagaagtatacacttccgctgtaccacgcaatgatgggtggcagtgaggtggcccagaccctcgccaaggagacttttgcatccaccgcctcccagctccacagcaatgttgtcaactatgtccagcagatcgtggcacccaagggcagttagaggctcgtgtgcatggcccctgcctcttcaggctctccaggctttcagaataattgtttgttcccaaattcctgttccctgatcaacttcctggagtttatatcccctcaggataatctattctctagcttaggtatctgtgactcttgggcctctgctctggtgggaacttacttctctatagcccactgagccccgagacagagaacctgcccacagctctccccgctacaggctgcaggcactgcagggcagcgggtattctcctccccacctaagtctctgggaagaagtggagaggactgatgctcttcttttttctctttctgtcctttttcttgctgattttatgcaaagggctggcattctgattgttcttttttcaggtttaatccttattttaataaagttttcaagcaaaaaaaaaa

SEQ ID NO: 456 - DNA, 1293 bp, Homo sapiens
  misc_feature (1)...(1293): n = a,t,c or g
tgcgcaagcgggagttccggctggagacccgtgctctgggccggcgccttcaccatggcctcggcagagctggactacaccatcgagatcccggatcagccctgctggagccagaagaacagccccagcccaggtgggaaggaggcagaaactcggcagcctgtggtgattctcttgggctggggtggctgcaaggacaagaaccttgccaagtacagtgccatctaccacaaaaggggctgcatcgtaatccgatacacagccccgtggcacatggtcttcttctccgagtcactgggtatcccttcacttcgtgttttggcccagaagctgctcgagctgctctttgattatgagattgagaaggagcccctgctcttccatgtcttcagcaacggtggcgtcatgctgtaccgctacgtgctggagctcctgcagacccgtcgcttctgccgcctgcgtgtggtgggcaccatctttgacagcgctcctggtgacagcaacctggtaggggctctgcgggccctggcagccatcctggagcgccgggccgccatgctgcgcctgttgctgctggtggcctttgccctggtggtcgtcctgttccacgtcctgcttgctcccatcacagccctcttccacacccacttctatgacaggctacaggacgcgggctctcgctggcccgagctctacctctactcgagggctgacgaagtagtcctggccagagacatagaacgcatggtggaggcacgcctggcacgccgggtcctggcgcgttctgtggatttcgtgtcatctgcacacgtcagccacctccgtgactaccctacttactacacaagcctctgtgtcgacttcatgcgcaaactgggtccgctgctgaaggccattgctccatctcacctctgctcccagaaaataaatgccctgaaaccctccccccanaacctgcaatctgtcgggcactcttctcgttcaactccctgtagccctttgggactttgcggtcccctaagtagaaaattcctatgggcctgtctcctgggggcctctgtctgctggtggtctgcttaccacagaatcctaaggggcaggagtgcctgggcatgtgtctgtgggagccttgcagtcagttgtgtttggacaagtgcaacagtcaggctgctgattcctgtggcatgcaggctgtagaggttgacaaatggaggggggtgttgagggtgagccctagttgattttttaaaatttaaactctggtaagaacatttaatatgaaaaaaaaaaaaa

SEQ ID NO: 457 - DNA, 1155 bp, Homo sapiens
cccacgcgtccgggacagactcccatccactggggtcagggaccggaaaggcgacaaaccctggaaggagtcaggtggcagcgtggaggcccccaggatggggttcacccacccgccgggccacctctctgggtgccagagcagcctggccagtggtgagacggggacaggctctgctgacccgccagggggaccccgccccgggctgacccgaagggccccggtaaaagacacacctggacgagcccccgctgctgacgcagctccagcaggcccctccagctgcctgggctgaggtgtctggtgcctggaacagacttccctgtggaggattcctgccagaccctgcccggctcctccctgaccggtccttgtgccctcaccagacaccctgttggccatgactcaacaaaccagtgttgggagccgtctgcctccccagctcagtgcctttctgcaccccttctctcctggggagctgtctgcatccgccaccccctccaaccactgccctcagcccccgaccttatttattaccctcccctcccacacccccaatctacctggtgatgattttaagtttgcgcgtgtcttgggttgggctggggggtttcccacatgcagtgtcagaggggccgcccggtggggctatctccgttgctatattaatggcaagactaaatgaaacctagggcacggcctccgaagctgcgtgtggccccttagaggtgagcatcagagccagagcagtgagggggagactcacccaccctctccctctcccttcagctctgggaggcaggcgcagtgcccccctcccgtgggctggcccaggaccgcgggtgaaacctgggtctgtttagtttctttggtttttgtatgtttgtttgtttttgacacagtctcgctttgttgcccaggctggggtgcagtggcacgatcgcggctcactgcaacctccacctcccgggctcaagcgattctctcacctcagcctcctgagtaggtgggattacagatgcccgccaccacacccagttaatttttgtatttttagaagagatggggtttctccatgttggccaggctggtcttgaactcctggtctcaagtgatccgcccgcctcggcctcccaaagtgctgggattacaggg

SEQ ID NO: 458 - DNA, 1297 bp, Homo sapiens
ggcaccaatccaatgtcagtatctgcaggctgaagtacagacagttacactgaaattgcgtatgctctgaggaatgacactaaattcgcttccaggaaaattactcaattttgtaagtaattttcagttttttttctcagggatatttttcaactttcactttaattttctttagttgcttagttgtacattttgagaaggcaaatccattggaacttggggaggcttagaacataaatcagtattagaagtaaagggaacacacagctaaaagttttactttaatcacaaattcacaactagagatatcatttgcatatcttagaacgctaaagacctgttaaaattttttaaccaatcagcaaaaatatgtgccccacagatttctaatgttcataatttagaatttatcacatataatatttattaatagtttatttgcaaaattattattcttaaaacacttctttccaacacatttacaatgttcatgtgttttaaagaaaaaaaccaccctcatttaaaaatgtactactgactttaatgtgtggttataccagtgccaccaaattagaaaagaaaaagaaacatacagctgtattggatatgtagttactactacaaataatgacaacacacgtcctatacaaagatcatattcacgcttttctaccacttctcagtcattgtcagaaccatttggaggtaagaaaaccaatgcatcattgaaaatatggcccaaatgccctaaggcggtataccccatacatcatcacatgcatctgatttggagtcagtccattaaaagtaacagccatatctgaacaacagccttctactacctggttggggtgataagtcattgcctctttaatagaaagcccaacagatttggtattaaatacatcttttccatcagcatcttctgcattttctgcaaatactccagcatatttcaggcaaactgctagctgtttatcttcagatatcttccaaatcatccctccctgttcaggacacttttctgggatattgagaaggctgttaagtcttttcattgattctacacttaagacaattcctccttccatacccacatattcaaggtctccagattttatagtgtggcctagatagaaaggctgtgatggatccttttttaacaaaaaatactttaggttttcaatgatagcaaacgtagtggggcgtgcaaggaagaaccagttgtattggtctctatacttacaaatacgcctttgataagtatagagaccaatacaactggttcttccttgca

SEQ ID NO: 459 - DNA, 777 bp, Homo sapiens
ttttttttttttctgaagaagcatttattagcatgcagggcccatgctagaggctccttatttccagggcaaggccagcgagacagagcccattgctcaggacgcagcccagattgcaaagagaggacagcccatggtagcggaagaaattctggcggagagcactgtacttggggtccttctctcgcagctggcggtagggatcgggaccctggtggctgcctggtacctccccacccaggcctcgctccttctccacggtttgcagggcccacatggcagctgtggtgcggggttccagccagcgggcgttgacagtggccagcgtaaggctcaggaacagcaggtaaagctggctggcctcccagaatgtgagctgagcccaagcatgctgtgaagccaagatgcagaggttgatgaaggcacagcccatggagatgtggaagtagaaggggaagagtttgctctgcactagtccgaaggtatgtcggggaaggcttcggaaaagcaggaagcctgagacgaaggtcacccacatttgcatgccccaggcacctgacaagaccagtagatggaccatcttaatcaggcctcctaggttcccgccttcctccatcttgcagtccgttaggaaccgggacctcaatccgcagcacccggattccgagaacagaggcgtcggggccaaatgggctgaatctggtacctcactcccacgcccccgggtggacagcgaccctcctcggccgcgtcccctcgtgggtttcccctcgtgcc

SEQ ID NO: 460 - DNA, 859 bp, Homo sapiens
cctgtggaagaagagcaggatggagagcatggtctggtcgatgttgcggttgcagatgccctcgttgatcaggtagcaggggtcccgcagcaccggctctagcgaatcctgccgcattatgctgttgagcttgtcggtattgaggttctcaaagaccagcttttcctgcagctgccgaaagttgctcactgtagggctgcccgggttgttgttctccccgctgctgcctcgctggagcccactccgatgggccaggtccaggcagcagttgcagcagtcgaggccgacaggtgagcggcaatcgagcttggactgggccatcttctcaggctcggaggtcgcctggcctgcgaggtcaggggcggctggcaggtgcgcgcccaccgagctggcctgaggggactccagggtgcctggaaaagacaagctgtgaggaaaagagttggaaattagcgcctaaagccagccaccttcggctcggcccccttctggctgtactgctccgggtgcgaatagaaacagctggacaaacagctccgagcggatccttcgggctcacttcctcctcttcctccttctcctccccctcctcttgaggccgggggccgcccccctgaggtgccacacgcggccccagcgcagtcccaagtttcccaagtgtgagcggggattggggcggacctgtggaggcaggaagggcgggcagcagggcagagggagagccagggcgcgcccttgctccctccctcctttgctccctccctccccggtttgcaggctctcaggctctcgggctcccctgggctgtgacggctgagcggtggcaggagctgagagcgagtgagctacgaaatcgtcg

SEQ ID NO: 461 - DNA, 1975 bp, Homo sapiens
agaaatcagctttcttcacagaagtcagtgccgtgggtacccattttaaaatccctgccactttgggctatcgtagttgcacacttttcttacaactggactttttatactttattgacattattgcctacttatatgaaggagatcctaaggttcaatgttcaagagaatgggtttttatcttcattgccttatttaggctcttggttatgtatgatcctgtctggtcaagctgctgacaatttaagggcaaaatggaatttttcaactttatgtgttcgcagaatttttagccttataggaatgattggacctgcagtattcctggtagctgctggcttcattggctgtgattattctttggccgttgctttcctaactatatcaacaacactgggaggcttttgctcttctggatttagcatcaaccatctggatattgctccttcgtatgctggtatcctcctgggcatcacaaatacatttgccactattccaggaatggttgggcccgtcattgctaaaagtctgacccctgatatggggatctcgctccatcgcccaggctggagtgcagtggcgtgatcttggttcactgcaacttccatctcccaggttcaagtgattctcctacctcagcctcctgagtatctgggattacaggcgcccgtcaccacgcccagctaattttttgtatttttagtagagatggggtttcaccatgctggccaggctggtctcgaactcctgatctcatgattcgcccacctcagccccccaaagtgctgggattacaggcatgagccaccgtgcccggccgcttcgcatttttcttttgcaggttgcatgccagccaatattcctctgtgctgggaagggaaagtttgaggatgtatcaagaccatagcagtggatctcactgctcttgcctactcagggctttatctacacattgatagcccctcagaggaaaggcaccagccgaagagtcgacactggctctgggcttggatgctgcctctgataaacgctgggcactctgaccctgaagccagggagggagtgcttggcagctgcctgggcacactcccctcagtccagttgccaggcgaaattatacagtggatggcagctccacagagatgctaaagtttgaggtctaagtgtcagagagagctgacaatttttatgaggaaagtgaacaacaacaggtgtttatcagtacctgagaattatcatctagtttaattaagcaaaggtatcaggaggtctgtttcagctcattccctttagtatggccctaaaaaatcaacagaactgtcctacttcatgttgcccgactagcaggcaggtatgtgaacctaaagtagaagtcctagcttacatattattcataattaaacacagttcattttattattctggcaactagtgatatttcatgattataggccttaaaaatctaatacaagtacaattaaaaaaagacatagaatgcttacacaatacagaaggcactttgaggttacatgataaataaaaatacattaatagaggcaggattatttattggttccttcagtgtctgtgtccatggtgatcattgagagcccagttttgtacttcacctttggcgaaatagtgttaaagaaaatggcaccaaaaacattaatagcagcagcaatatagaacacggtttgccattctccaacagtgttatcaggggtcagacttttagcaatgacgggcccaaccattcctggaatagtggcaaatgtatttgtgatgcccaggaggataccagcatacgaaggagcaatatccagatggttgatgctaaatccagaagagcaaaagcctcccagtgttgttgatatagttaggaaagcaacggccaaagaataatcacagccaatgaagccagcagctaccaggaatactgcaggtccaatcattcctataaggctaaaaattc

SEQ ID NO: 462 - DNA, 716 bp, Homo sapiens
actgatagccctcgaaaccgttgaggaccctccgggacgacccacgcgtccgcacacagtgggcatccaggatctccccgaggtagcctgagccgccaccccagctcccagctggcaggtcctggggtggaggggggtgaaggcacccagaaacctcgggactacatcatccttgccatcctgtcctgcttctgccccatgtggcctgtcaacatcgtggccttcgcttatgctgtcatgtcccggaacagcctgcagcagggggacgtggacggggcccagcgtctgggccgggtagccaagctcttaagcatcgtggcgctggtggggggagtcctcatcatcatcgcctcctgcgtcatcaacttaggcgtgtataagtgaggggctctgccccgcatcccaagacttttcttcctgttgggagctgccttgggcccattccctcccctggggggagcccaactgatggccctggccccacccctaaggaccaagggagcctgagcggccttgtttacagcttctgtcctgctcctgcatctttgccagggtccttttgccaactgtaagggccttgcctcattccctggcaatggttccaacctccctgcactaatgcctgcatcccctccggcctcttggccccctatccctgcacttctgggaaacctccctggcactctgggaaacctccctggaacaacttcccaaat

SEQ ID NO: 463 - DNA, 595 bp, Homo sapiens
ctttttttcttttttttataaaacatgtcacatcttgatgcagttgatgtcaagtgtgcttaagtcattatgaatcaagagactaacaatagtggctgcagaaacaggtttgttgtctgtacaaagacttcaggtaaattatagtacttccatgttagctgtgcatgtccaccacgctttgtctgtaactcgagtagaaaaagatgttgtgttttaattaatcattccttacaattcaagatgaactccacatatttaagaattcttggctgaaagaaaagtcttcaagatactggatgcctctcaccactttgacaataaacacacaagaaaaccattgtgtaaggcactcaaaaggttcttatcaatcacgagagatcagtcacactgacattcattcccatgccaggactcacgtaagggacagcatgcactgctttgggaaattctggagtcataacacgtccattttctccagtacttcctgtaattgacagccttgccttgttcctcatggcatcattcaaggtcatcttaaatgagagaggagggaaagaaagaaaaagagatcatacgttatggttttcaaatgcat

SEQ ID NO: 464 - DNA, 2017 bp, Homo sapiens
ttttttttttttccttttaaaaactttatttaaatggagactcttagtcaaatgattggaaaaccaataacgaaaaatagttcttcaggttcttctcctggaaaggcggaggacacaccaaactgcactggccctgtcaggggacacggcaccctcgtgggaccaggctcagccctcggggtggcacgaggtcctgcaggctgcaggaccctcacactccagccccgtctggtgacccaacccgggcccgtggtgcatgctggggaaggccactggccggcccctgggcttcggctcctgaggaggcatggccccacaccctgcccggccataaatatatacagattcctgggcatccagggcaccaggaccgacgcagagctggggtcctgtccctaagcctgtggcacagcgactcttgacatgggagccagggagctgggaccgccgcacccctcccctgcctccctcctggggtcaccaccctcaggcggctgccagctggcctaggacgcggcggaactgctgggtgctgtggcccagctccttgaccctctccaccatgtcctgggccgcggaaggcgatgggtactgcaaggcagcggccttggtggtggccacgatgccgcgcaggaggtcgcacagcaggttgctgtagtgggtcacctggctgcgcacgtcagcagccttggcctgccgtgacagtgtgtccccgatgaacaccagcttgtgggcgctgaggatgacgaacttgctgtgcgccacaaagatcttgggcggctggttggtggccacggcggtaaagaaggcgtccacggcgttggtcagtgtggtcaggttggcctcacactgctccaggtagaagagcagcagctgccggtccgagggccccaggccgcctgttcgccccggggccaggggttgggctggcgtccagttggccaggtcgtggtctatgggccgtgacacctcctgttccagtcgttcaaactgcttcagctgctgcaactccagctggctcttgccctgccgcgtgatgctgcccttttccagcagctccttctgggtcttctcaaactcctccttcccctgtaggtggacgtagtcatagtcctccatccagcccccctcgctgttctcgtactgcccatctggcgagtcctgggaggtgaacttagggggtgagggcaggggtcgtgactggatgctgctggtcttgtcagtggggttggggtgcagggtgccacccccctcaggccccggggcagtggccttggtccgtctgaagagcagtgaggcattgccgtgcaggaaggaggccagctgcttggcgtcctcgggcacagcccgcgagcaggccaccagccggtccaggtcctcaagggtggctccagagcctccccggccagcgtcgagggcctgaccatgtgccaccagcgtctggtgcacgtcctccatcttctgcagctgccggctaagcttggcatgcagggcacggtcagatgtgtgggcagcattgcccaccgcgctgcgggcaaactccaacagctcgtggacggcactctggacggcggccacagcagcctgcaggtcctgcaccagcggctcctgtggctcagaggggctacgccagctcccagtcgcaccggcgctgcctgccaggtccagaaggtgggcaacggtggcgctcacaccctgctgcagccgtgccagggcctccacagcaacttccagctccaggggttcccggcccggccctgccacctccaaggaggacgcagactggctgctgcgtgtgctgccggtgctggaggccgacaggcgcttgccctctgccggggcttcacgttcagctgggggaggcaccgcatacacaccactgtcgaccacgccaccatcagccacctcaggaggaagcacccgttcacggggcacatcgtacagggtgcccgggccaggccgccgcaagccagggggcacgtcgtagaggtcaggagccgggggcggcacgtcatcc

SEQ ID NO: 465 - DNA, 1575 bp, Homo sapiens
ggatttcgtttcctccggctgggagtggccgctctaggcagcgttgaggtcgcggggttgaggggggttgtgaaaggagagcggcctctcctctatggtcacggggccggggcacgcttcccccactctgtcttgttacttccggtagcgaagcctctccctcttcctctgctcccgcggggtctgtgctgagaataatggcccggttggcccgggacgagtggaatgattaatgatgttttgcagcagttttctacgtctgaaattttttatgtctctggaacccagaatttgctaagagatggaggaacctcagaaaagctatgtgaacacaatggaccttgagagagatgaacctctcaaaagcaccggccctcagatttctgttagtgaattttcttgccactgctgctacgacatcctggttaaccccaccaccttgaactgtgggcacagcttctgccgtcactgccttgctttatggtgggcatcttcaaagaaaacagaatgtccagaatgcagagaaaaatgggaaggtttccccaaagtcagtattctcctcagggatgccattgaaaagttatttcctgatgccattagactgagatttgaagacattcagcagaataatgacatagtccaaagtcttgcagcctttcagaaatatgggaatgatcagattcctttagctcctaacacaggccgagcgaatcagcagatgggagggggattcttttccggtgtgctcacagctttaactggagtggcagtggtcctgctcgtctatcactggagcagcagggaatctgaacacgacctcctggtccacaaggctgtggccaaatggacggcggaagaagttgtcctctggctggagcagctgggcccttgggcatctctttacagggaaaggtttttatctgaacgagtaaatggaaggttgcttttaactttgacagaggaagaattttccaagacgccctataccatagaaaacagcagccacaggagagccatcctcatggagctagaacgtgtcaaagcattaggcgtgaagcccccccagaatctctgggaatataaggctgtgaacccaggcaggtccctgttcctgctatacgccctcaagagctcccccaggctgagtctgctctacctgtacctgtttgactacaccgacaccttcctacctttcatccacaccatctgccctctgcaagaagacagctctggggaggacatcgtcaccaagcttctggatcttaaggagcctacgtggaagcagtggagagagttcctggtcaaatactccttccttccataccagctgattgctgagtttgcttgggactggttggaggtccattactggacatcacggtttctcatcatcaatgctatgttactctcagttctggaattattctccttttggagaatctggtcgagaagtgaactgaagtaagtatgttttaatggttgtcacaacaggggatgggaaagaaataccaagtgagagaaagatcctcttttatttctcacacttgaaataaatcctccatccacccagaaaaa

SEQ ID NO: 466 - DNA, 493 bp, Homo sapiens
agaaaaggctaggatgatatatgaagattacatttctatactatcaccaaaagaggtcagtcttgattctcgagttagagaggtgatcaatagaaatctgttggatcccaatcctcacatgtatgaagatgcccaacttcagatatatactttaatgcacagagattcttttccaaggtttttgaactctcaaatttataagtcatttgttgaaagtactgctggctcttcttctgaatcttaatgttcatttaaaaacaatcattttggagggctgagatgggaaataaaagtagttaaataacatcagaaactgagttcctggagaactacagtttagcattcctcaggctactgtgaaaacacaaccgttatggtctttgtctccatttttatcaaggttttccatggttaagtttggagaaaataccacacaaaacaatgaattgccaaattgtttgttttattcaagactcaatctactttgcaagcg

SEQ ID NO: 467 - DNA, 1572 bp, Homo sapiens
cttgtactacagtcaagatgaggagtccaaaataatgatcagtgactttggattgtcaaaaatggagggcaaaggagatgtgatgtccactgcctgtggaactccaggctatgtcgctcctgaagtcctcgcccagaaaccttacagcaaagccgttgactgctggtccatcggagtgattgcctacatcttgctctgcggctaccctcctttttatgatgaaaatgactccaagctctttgagcagatcctcaaggcggaatatgagtttgactctccctactgggatgacatctccgactctgcaaaagacttcattcggaacctgatggagaaggacccgaataaaagatacacgtgtgagcaggcagctcggcacccatggatcgctggtgacacagccctcaacaaaaacatccacgagtccgtcagcgcccagatccggaaaaactttgccaagagcaaatggagacaagcatttaatgccacggccgtcgtcagacatatgagaaaactacacctcggcagcagcctggacagttcaaatgcaagtgtttcgagcagcctcagtttggccagccaaaaagactgtgcgtctggcaccttccacgctctgtagtttcatttcttcttcgtcgggggtctcaggagttggagccgagcggagacccaggcccaccactgtgacggcagtgcactctggaagcaagtgactggccctggaggtggggcccggggtcggggctggggaaggggagccccagggtcgccagagccgcgagccactccagcgagaccccaccttgcatggtgccccttcctgcataggactggaagaccgaagtttttttatggccatattttctactgcaattctgaagtgttcatttctcacaaactgtactgactcgaggggcgctgatttcataggatctggtgctgtatatacgaatcttgcaaagctctaactgaacggaccttcttattcctctcccctaacaccatcgtttccactcttctcagtgtaggtaaccgtctatggtgtgttttttcattaatgacaaaaaaaaaagggtttcaactggattatttaaatattggtaaatattgtgcattagggtttgtttttccttttaagaagtatgtcctttgtatctctaagttacatgacctatatcttttcctctttaatagtagttttatgttaacctttaagagatttgtttttcctcaaaggagaatttaaaggtatttttttaaaattctaataagaggatcagccgggtgcaatgactcatgcctgtaatcccagcacgttgggaggccaagtcgggcggatcacaaggtcaggagatcaaggccatcctggttctatactgtgtagattgctggctactaaaaatacaaaaaattagccgggcgtggtggcacacacctagtagtcccggctactcgggtaggctgaggcaggagaattgcttgaacccgggagacggaggttgcagtgagctgagatcgtgccactgcactccagcctgggtgacagagcaagactctgtctcaaaaaaaaaa

SEQ ID NO: 468 - DNA, 1927 bp, Homo sapiens
cggacgcgtgggggagctgtgagtttcgaggatttcatcaaaggtctttccattttgctccgggggacagtacaagaaaaactcaattgggcatttaatctgtatgacataaataaagatggctacatcactaaagaggaaatgcttgatataatgaaagcaatatacgatatgatgggtaaatgtacatatcctgtcctcaaagaagatgctcccagacaacacgttgaaacattttttcagaaaatggacaaaaataaagatggggttgttaccatagatgagttcattgaaagctgccaaaaagatgaaaacataatgcgctccatgcagctctttgaaaatgtgatttaacttgtcaaatagatcctgaatccaacagacaaatgtgaactattctaccacccttaaagttggagctaccacttttagcatagattgctcagcttgacactgaagcatattatgcaaacaagctttgttttaatataaagcaatccccaaaagatttgagctttcagttataaatttgcatccttttcataatgccactgagttcaggggatggtctaactcatttcatactctgtgaatattcaaaagtaatagaatctggcatatagttttattggttccttagccatgggattattgaggctttcacatatcagtgattttaaaatatcagtgttttttgctactcatttgtatgtattcagtcctaggattttgaatggttttctaatatagtgacatctgcatttaatttccagaaattaaattaattttcatgtttgaatgctgtaattccatttaaattccatttatatactttaaggaaacaagattacaacaattaaaaaaacacatagttccagtttctatggccttcccaccttctgttagaaattagttttatctggcatttttaaacatttaaaaattattaaacatttaaaaattagtttattatcagatatcagcatatgcctaataaaacttattttaataagcatttaattttccataatatgttacagccaaggcctatataataattttggatttgttcaatctttcttacaggctgttttctattgtatcaatcattagtatcaatcattaagtggaagttgaagaaggcatcaaacaaaacaaggatgtttacagacatatgcaaagggtcaggatatctatcctccagtatatagtaatgcttaataacaagtaatcctaacagcattaaaggccaaatctgtcctctttcccctgacttccttacagcatgtttatttatattacaagccattcagggacaaagaaagaaaccttgactaccccactgtctactaagaacaaacagcaagcaaaattagcaagcaaaattcactttgaaagcaccagtggttccattacattgacaactactaccaagatttagtagaaaataagtgctcaacaactaatccagattacagtatgatttagctcatcataattcagattatttttaatcatcttagccaaaactgtaaagttgccacattactaaagccacacacatcgtccctgttttgtagaaatatcacaaagaccaagaggctacagaaggaggaaatttgcaactgtctttgcaacaataaatcaggtatctattctggtgtagagataggatgttgaaagctgccctgctatcaccagtgtagaaattaagagtagtacaatacatgtacactgaaatttgccatcacgtgtttgtgtaaactcaatgtgcacattttgtatttcaaaaagaaaaaataaaagcaaaataaaatgttaaaaaaaaaaaaaaggggcggccgttttaaaggatccagttttacgaccgcgggctggcaaggaaaaattttttttatggggccccctaaattcaattcccgggccg

SEQ ID NO: 469 - DNA, 1013 bp, Homo sapiens
cccctaggagccctgaacaccatacgccagcttggcacgaggggagaagtctcggtcctataatggccagcatggcagacagaaacatgaagttgttctcggggagggtggtgccagcccaaggggaagaaacctttgaaaactggctgacccaagtcaatggcgtcctgccagattggaatatgtctgaggaggaaaagctcaagcgcttgatgaaaacccttaggggccctgcccgcgaggtcatgcgtgtgcttcaggcgaccaaccctaacctaagtgtggcagatttcttgcgagccatgaaattggtgtttggggagtctgaaagcagtgtgactgcccatggtaaattttttaacaccctacaagctcaaggggagaaagcctccctttatgtgatccgtttagaggtgcagctccagaacgctattcaggcaggcattatagctgagaaagatgcaaaccggactcgcttgcagcagctccttttaggcggtgagctgagtagggacctccgactcagacttaaggattttctcaggatgtatgcaaatgagcaggagcggcttcccaactttctggagttaatcaaaatggtaagggaggaagaggattgggatgatgcttttattaaacggaagcgtccaaaaaggtctgagtcaatggtggagagggcagtcagccctgtggcatttcagggctccccaccgatagtgatcggcagtgctgactgcaatgtgatagagatagatgataccctcgacgactccgatgaggatgtgatcctggtggagtctcaggaccctccacttccatcctggggtgcccctcccctcagagacagggccagacctcaggatgaagtgctggtcattgattccccccacaattccagggctcagtttccttccaccagtggtggttctggctataagaataacggtcctggggagatgcgtagagccaggaagcgaaaacacacaatccgctgttcgtattgtggtgaggag

SEQ ID NO: 470 - DNA, 1543 bp, Homo sapiens
ttttttttttttaactttaaaactgccgtcttctgctttattgacaggtaaattgttcaaaaatgttctcacaattcaataattaattacaaagactgagacttacattaaaaaagtaaaaaccagaaccccccaggtgcccatccagcagaaggcccaggagggcagtggggtggcagggctaggcggtgctgggccactcagtgccgacttggggaagtgcacgtcctgaacagccttgccaagcagccgaccggtgggaggacaggggaagcctggcccaagctgtggacaagctgtgtctgccgccacagttaatcacaagcctctgacgacacagggccacagagctggtcactcaacatctggtacaaagggtgaggtgaaatccacgcgcaggggattgctgtgccgtgggccggggccagtgtgcaggagtgtgttgggtgggtctacgtgatcatacgggctactaatcacgggggctcccatgcgggggcaggactggtgggggggggggcgggccagggcggggcggggtggggtatcccagtggctgcttcgtgggcgccctggggctctgacttccctcagcccagcaggccacaggggctgcctgcaccacgacactcgctggttttatggcaggaggcagaagccgtggaagcgaatggaaaacagcacagctgacttcacagtagtagatactggtgacacttcatggctgcgacccagaatgaacttaacgcacacagggacgcagggtgtcactggtcctgggcctttgtccatgactaggtggtcagcaggacttctgcagctgactgtgcaatggctaaatgaaaaaaaggccacagactaacctccactttcctgtcttcaaaattctagtgacactgggaatgctataggacctcctactattctcttaaggtcctaggaaagtttcaggaactagggaaaagactgggtactgaggctgtgtccccagatgtctgcttccgaagcagccgcgtcatgacgggtttctgctgaggaagtggtgttggcagggccccatatgccctctcgggttgtcaggggtgggagacaggctgtatgggggtccttcatgtgcagatggaacagcatcgcctcacagctgtgcagacgaacagatgtggtctactgccacgaacaatgcggcataaaactgatcaatattataataaagatttgtcttcttcatctcccatatctacaaagtgattctacatttccttggacaacactggagggcccgctcagtcttggcactgacgctggaggccatctccagctccctggcccctgtggcgagctggcggcttcaggtgtcacaggccggctgctccaggccttcgagggggagctggctcctgtggggggagttggggctcggtgggccgctggggttggagctattcgatggagttgagtgtttggtggagtccgaatcaggctctttgtcaaagtcctggtctggatcagacatacttctcagaggcacagtgcacgctacgct

SEQ ID NO: 471 - DNA, 1154 bp, Homo sapiens
actacagtgcggtggaattcgctgagcgaggcagcggcggcagcagcggggacgagctcagggaggacgatgagcccgtcaagaagcggggacgcaagggccggggccggggtcccccgtcctcctctgactccgagcccgaggccgagctggagagagaggccaagaaatcagcgaagaagccgcagtcctcaagcacagagcccgccaggaaacctggccagaaggagaagagagtgcggcccgaggagaagcaacaagccaagcccgtgaaggtggagcggacccggaagcggtccgagggcttctcgatggacaggaaggtagagaagaagaaagagccctccgtggaggagaagctgcagaagctgcacagtgagatcaagtttgccctaaaggtcgacagcccggacgtgaagaggtgcctgaatgccctagaggagctgggaaccctgcaggtgacctctcagatcctccagaagaacacagacgtggtggccaccttgaagaagattcgccgttacaaagcgaacaaggacgtaatggagaaggcagcagaagtctatacccggctcaagtcgcgggtcctcggcccaaagatcgaggcggtgcagaaagtgaacaaggctgggatggagaaggagaaggccgaggagaagctggccggggaggagctggccggggaggaggccccccaggagaaggcggaggacaagcccagcaccgatctctcagccccagtgaatggcgaggccacatcacagaagggggagagcgcagaggacaaggagcacgaggagggtcgggactcggaggaggggccaaggtgtggctcctctgaagacctgcacgacagcgtacgggagggtcccgacctggacaggcctgggagcgaccggcaggagcgcgagagggcacggggggactcggaggccctggacgaggagagctgagccgcgggcagccaggcccagcccccgcccgagctcaggctgcccctctccttccccggctcgcaggagagcagagcagagaactgtggggaacgctgtgctgtttgtatttgttcccttgggtttttttttcctgcctaatttctgtgatttccaaccaacatgaaatgactataaacggttttttaatgaaaaaaaaaa

SEQ ID NO: 472 - DNA, 5202 bp, Homo sapiens
atccaagggttgtatcgagcctataaaagcacagttttaagagagattccctttttctttggtccagtttcccttatgggagtccttaaaagcccttgggtcctggaggcagtatcatgtggtggattcttggcagtcagcagtctgtgcagcttttgcaggtggatctgccgctgcagtcaccacccctctagacgtggcaaagacaagaattacgctggcaaaggctgtgctccagcaactgctgatgggaatgtgctctctgtcctgcatggggtcttgccgttccaaggggctggcagggattattgccaggtgtccttcccctccgaaatggccagcccatcaagtctggggaggtttccatctttctgggggccttatgacccgaaacgcacagcttgctgttggaagttggcagaaagagtcccttgaagcagagacaagcctcacctccacttctgtcaagagaggggcctgcagtgcaaaccctcttccgctgagcagctgtctgaactataggccccagtgctgaagaccagttgtgctaagataccggcatggagattgtgccatccgtggtataggctggctggtatgaagtcattggcctgtatgccagagagctaagagaagaaaacggggtctgtggcggtactctgaacaatttcctcagaacctcttaataaataagtttggtaatgctgaggccaggccttttagagctttcatttgatctgtatctgatctttcatttcctgacacctgatggtggattcagcagaaggcaagatggttataattctaaaagaatagcttgtttgtttgtttgtttggggaaaaggagacttggggaagagttgtgtatgtgggtgtttctccccctagttaattcctgttgtgtaagggtaggctttgttgaaaaagaaagaaagattgaactacaggtgcatagcaagcactctttctgggtaactaggctgctggttttaattaccctcagatttcacccataaaaacgcacaattgtattattttacagagatgtgtccagcgccccctgtggtgtgtgagagaaagcagctgcaactcaagtgactaggtgggcccagctggcttcgtgcaggagggcacggtgggtgagccattctcgccattctcatgtcagactgaaaggagggcctgggccagctttgaaaaggcaggatgaaatggaaaggtcaccacacttagggattttagaccttgactaacaagctccaggtgtagaaaaattcaaaacaaaatgtcaggaatctagcagtgttgtctgccctggagcaaacaaacagtatgtgattttgcttcgcctattttttttttcttttttgggggaagataattaaaggcagaatgactgcgtttgtaaaagaaggaccaccaactatactgacatttataaatgaacctttattaaagacacttcaatgccatttgttagacacttcaatattttacatggttttcaatgtacactgtaccaaaatttctataaataaataactttgtacataaaagtaatactccctctttcacattgcctctcagaagcagcaaattcacatattttgtggaagtaagattagtcagttaactgtcaagaacaaaattctaaatgtgcttaccttttgaacagtgatgacacctgacagtaattgttaactattttctcagtaactcccttcagcttttggccaaaggaacatttgaaggaccttgtttctatttaagttttactaaatgacacattggcactcataagatggttagctaccagtctcaaaagtgcaaattatacccagaacccaggtcaagggctgtcctttccagtcccagctcagtttcatctgtgcgaaggaatggcatggacaggcctgctctgggtccttagtagaaataaggtagccctgaaaagtcagaacttcctcctttctgtcccccaaggccaatgtaatactcattatattggcaaaacgaaaacatcagtatagaaaaatccacaggtaccaacaccagcagcctttaccttaatttaaaagtctcaaatagcaatcgaatgatactgagaaggccacatttgcttttatcataaaataagaggaggaggaaaggcagtgtttaactgttctgaccttttgcttgtgatggattaacaaccctcattctacgccttacagacggacagattctacgccttacagacagacaggacttaaacctaaaaggaaaagccattcactgcaagtgtggatggcacttgcacccctggctctacagacagggaagcctgttgcaggggcatccacacatgagcagtgctcacctgaagctccttccggcgcatgtggagtcccaccgcacagcagcctaggggtctatgaagtgcaatataaatccaaggccttccatccttcccaccccgcaccaaaaactcctgtgaacaaatgtggttgtagcctctataaattccagccatgcgttaaggcaccagaactatttccccaccccctccaaaattaaacagcaacctgatacgaaaaataatattgtcaaaattgtataatttttttctgttaaccatgcactaaagattaaaatagcctctgtaaaagatatatatgaaatctctgaaaactcttatgtacaatgatatcaaatacttttttttgccttttgtacacaaatcccctcttgcgtttactgtgcttcagatccaagtcctgtgagcgactgatactccacatgggagttacaactatgtacagatgagtgacgcttgaacccaagcttcctcgcagcctctcctacctctctttcccgtagagattggtatgacaagaactgaggtagacaaaacctagctttttggtgccaacagcagtggcaccctctgtttcccggggagctgtcctgtcagtggcgtggactcgggactggcgtcacatgctttggggaggtggccattggaaacaagcaagtactgggcttccgcgcgctctggactgcctgaagttaatgaagatgcaggctgtagctctgtggagtccgggtgatacaaccttgctaaagtccaggaagaatcccctttcccatctagagatgccattggctttttcttcacagccgtcagcattctatcgtggttactggggtagagcgacccttggcactcggggcaggacccagcggcagtcctgctgcactggtgatgtggagaatgctcttggtcactcccacccggctccgggccatttggcgcacttggctgtgcgctgtctctggacacaggctgggggtggaaggcttgtcccctggagtaacagtccacttcggtgttgcagtcactgcatacgacccggccaccgtgttccatcttatgtggcccaggtgtcccttcagctttctccatcgctttccacggctttttgtgatacgcagacccagcacagagctttggctgcctgcaggcaacgctgtgagtgtcgggctctggaaagtggcttgcatctcttggacacacaccattgctctcaatgtgcccattggcctgagggccaccctcggtcctgaccacggtttcttgtcggtcagaaagggtcccctgagaagagaggtagcttggaacatctggtggcacgacggtttcatctgtgttggtgacactgtactcttcactcttcttcctggtctggtagatgatgcacacccagaccagtgacgtcaggacgatgctgctcacgacagcaatggtgaagatgcctaccgtggtcccatccttcctgcagcctgctgcgggcaggacgctcagctggctgtgagctcgctccgtgcccagggtgttggacatctcacaggtatatcggcccgcatcctctgccaccacgttctgaaccaccaggagctggttgtcaggggtcaagtggtgccgctcagtgaggctcagcgggcggtcccccttgaaccaggtgatgcggggcggagggttccccgtggctttgcattggagggccactgtttctcccacagataccacacggtcttccaaggggaccaccaaggatggggtctctaggacagtcagggtggcattagctgaaatagaaccggctgagttctgagcagtacagctgtaaacccctgcgtcatctattttcacatcagtgatgaaaaacacgtcgtcatccggcatgacatgcatgcgtcgctcacgggcagcggggaaatccgtgcctccatccttctgccaggcaatctgagggtttgggtgacctgtggcagcacattcgaggcgggccatggtggtggtccggatggttatgtcgtggggcgttttggtgaatgatggcaacacattcacggtgagcctggccttatgtgaataggtggagccaaagtggttggtgatgacacattggtagcggccctcgtgcccgaaagtgacctgacggaggtgcaggatggtggtgtactccatcacttccccgtcctgcgcgtggacgtggacaaagttctccatgtctgcattggtcaggacttcattgtctttcttccaggcaaaggtcatgggggagctgctgctgctggctgctgagcatgtaaaccggatgtccttgcccaccatagccatggtggtttctggctgggtgatgatctgtggcttcaggaagtcatcgcacacgaaactctctggtggcacagagaaaatgctctgacccttcagtgattctgggtgggcacaggtggctgtcacaaaggcctgcagcatcctgccaattagccacgggggcagccacttcagctggcagtcacacaggaagctgtcgctgctgatatggagctctttaagattcttcatcttcacaaaggcatcaaactggacagatctgatcgcattccctccaaggttcaggtgctccaggccttccagccccgagaatgctctcttagccacagacttgatcttgtttccaaacagagtcagcttgctgaggctgtcgagccctgagaaggcgccgctcgtgtcctctattgtgcccgaaatctcgttatggtccagatccaagactcgcaggctcctgagtcccttgaaggcaccctccgcaatgtggctgatggaattgtggctgagacgcaggacactcaggctgctcagctcggccaggc

SEQ ID NO: 473 - DNA, 4715 bp, Homo sapiens
ggcggcggcgggggcagcgcggcgcgtgtctgtgcgctgcggtcgctcgggaccgggaccggggcgaggcgccgcggggctgagcccagcagacattgcgttggcctccgagcagggcgcatcatgcagcgttcgcgcaccggagagaaaactgagaatgaaattgctttggcaagctaaaatgagctcgattcaggactggggtgaagaggtagaggaaggagctgtttaccatgtcaccctcaaaagagtccagattcaacaggctgccaataaaggagcaagatggctaggggttgaaggggaccagctgcctccaggacacacagtcagtcaatatgaaacctgtaagatcaggaccataaaagctggcaccttggagaagcttgtggagaacctgctgacagcttttggggacaatgactttacctatatcagcatctttctttcaacgtacagaggctttgcctccactaaagaagtgctggaactactgctggacaggtatggaaacctgacaagcccaaactgtgaagaagatggaagccaaagttcatcagagtccaaaatggtgatcaggaatgcaatcgcttccatactaagggcctggcttgaccagtgtgcagaagacttccgagagccccctcacttcccttgcttacagaaactgctggattatctcacacggatgatgccgggctctgacccagaaagaagagcacaaaatcttcttgagcagtttcagaagcaagaagtggaaactgacaatgggcttcccaacacgatctccttcagcctggaagaggaagaggaactggagggtggagagtcagcagaattcacgtgcttctcagaagatctcgtggcagagcagctgacctacatggatgcacaactcttcaagaaagtagtgcctcaccactgcctgggctgcatttggtctcgaagggataagaaggaaaacaaacatttggctcctacgatccgtgccaccatctctcagtttaataccctcaccaaatgtgttgtcagcaccatcctggggggcaaagaactcaaaactcagcagagagccaaaatcattgagaagtggatcaacatcgctcatgaatgtagactcctgaagaatttttcctccttgagggccatcgtttcggcactgcagtctaattccatctatcggttaaaaaagacttgggctgccgtcccaagggaccgaatgctgatgtttgaagaactttcagatatcttctcagaccataataaccatttgaccagccgagaactactgatgaaggaaggaacctcaaaatttgcaaacctggacagcagtgtgaaagaaaaccagaagcgtacccagaggcggctgcagctccagaaggacatgggtgtgatgcagggaactgtgccctacctgggcaccttcctgactgacctgaccatgcttgacactgcccttcaggactacatcgagggtggactgataaactttgagaaaaggagaagggaatttgaagtgattgcccagataaagctcttacagtctgcctgcaacagctattgcatgaccccagaccaaaagttcatccagtggttccagaggcagcagctcctgacagaggaggagagctatgccctgtcatgtgagattgaagcagctgctgacgccagcaccacctcgcccaagccttggaagagcatggtgaagagactcaacctactgtttctaggggctgacatgatcaccagtcccactcccaccaaagagcagcccaagtccactgccagcgggagctctggtgaaagcatggactctgtcagcgtgtcatcctgcgagtcgaaccactcagaggctgaggagggctacattactcccatggacacccctgatgagcctcaaaaaaagctctctgagtcctcctcatactgttcttctatccattccatggacacaaatttccttcaggggatgtcttccttaatcaaccccctctcctcccctccgtcctgcaacaacaaccccaaaatccacaagcgctctgtctcggtgacgtccattacctcgactgtgctgcctcctgtttacaaccaacagaatgaagacacctgcataatccgcatcagtgtggaagacaataacggcaacatgtacaagagcatcatgttgacgagccaggataaaacccccgctgtgatccagagagccatgctgaagcacaatctggactcagaccccgccgaggagtacgagctggtgcaggtcatctcggaggacaaagaacttgtgattccagactcagcaaatgtcttttatgccatgaacagccaagtgaactttgacttcattttgcgcaaaaagaactccatggaagaacaagtgaaactgcgtagccggaccagcttgacgttgcccaggacagctaaacggggctgctggagtaacagacacagcaaaatcaccctctgaagggagggaccagtggccccttgtttgccaaaggcagagtggggctgagaaacaggctgcggtgattgcaattaccatccggtgttcgaggatcattggtgaagtcagcagatatttattgagttcctgtggtgtgcaaagcattatgataggcaccgtggggaaactggaaatgaatttgacatgaaaaggatgaacgattcactgattctctttgactcatttgagactaaaatgcagaattaccaacatttaaaacatatatatgcacatgtatttggtatgcatgtgtatatatataaaaatatataagagggactttatgggatagtatggactatggaaaaacaaatttgcacaatggcctgggaagttgaggtcactttttacagggaaatagaagaaactgagaacctagtctcgtatattctgagtaaatggaatcagtcctgggaatagagagtgtcctttgtgccagtattacaagaagcccaaactttatttttataaagggagaggatgactttctcaatcaagtgccaccagataaaaacaactgcagaggctggaactgccacaggctgtatgaaaggccactttggaaagggtttggatgagctggtggccttcaacctctgcctgcatctgccactttctgctaccctagggaggccaggaggagcttcggaggaccatcgccccactggtctagccatcatgacacctctggaggtgtcaagctcctgaaacaagctcatttcagtttctggcaaccccgtgtatttccgttttccccctaaagaacatatcataatcattgcacaaataaccatgttctttggtaatgaagccagaaaagaaagcgcaaaagaatggtgactcatttggactcttatctgtcttggaatgtcactgcttcattgccttctctgattgccttttgcatgtaaaactatgtgtctggagtcttttgccatctggatcttagtacctctttattatgtgcaatttattcctcaggtgtggaaatttctactgcaattgactacgtttgattattttgagcttgtgaaagatttctgaacagtgattgtcccgttaatagcccctcagaagatgttccctgctgataacagcatcctattttacttacttttatagcattactgtgcctagtcgtggggaaagagatggggctgtatagattatctgaatcatttgtctaagaggtacattcttccagatggaatcaataactttttttttccaggttcccgtgcttgctatcacagtatcattgttaagtgacacttttgtctctcataacaccatcacactcttccttccaagtctgagctgtgctggggtttgaactaaaagccatatgtggaatattgacatgtgtaagaagcactttcagaatgttgtcctttttaagaaatgattctcaaaataccagtttttattccaaaaatttagagaacaaacccggaatatgaagtgcagattgtaacatggagctatttttttttcctaatcccataatacagctcctaaaagttgtgtgggatttgcgttgcataaatagccatgtgaattccacaagaagcaccagggaaagtttagagatttgcggcaatggaccgaagaacgggccaggaagtcctccaatttcctttggtctttccaggagattggactacacattgtaaagactgactgggtttcaactagtcaaaaagcactttcttctgttttcaatccctgttcgatttgtgcttctgtgcttgtaggagagatggccagggtggcagccctcatgcaggttgaagtatatgtagcctcagcctgatattcttggtgcgaaggtaaaaaaaaaaaaataaataaaaccattggcctggttgagggcgtgaccaccaaaacatatatgttgggcccgggttcatcctgggtatttatactgtatatgtagagtctaaatttatatactgcaatgtaaaatatatatatatttaccttttttaaagacaatggaaattccaagtagctaaaacttagcttcatttatttaatgccactttaaatgtcttaaatttgtttcctggtggacagccgggtaatgcttttagctgctcgcatgcttgtctttctgcatctccatcatctgtttaccttttggttaaactaataaactagtttgggacttggctggcatgtgctgccagacccaaagggaaaaaaaaaa

SEQ ID NO: 474 - DNA, 1374 bp, Homo sapiens
gcacgagaaaagatggattcttgtattgaagcctttggtaccaccaaacagaagcgagctctgaacaccaggagaatgaacagagttggcaatgaatctttgaatcgtgcagtggctaaagctgcagagactatcattgatacgaagggtgtgactgctctggtcagcgatgctatccacaatgacttgcaagatgactccctctaccttcctccctgctatgatgatgcagccaagcctgaagacgtgtataaatttgaagatcttctttcccctgcggagtatgaagctcttcagagcccatctgaagctttcaggaacgtcacgtcagaagaaatactgaagatgattgaggagaacagccattgcacctttgtcatagaagcgttgaagtctttgccatcagatgtggagagccgagaccgccaggcccgatgcatatggtttctggataccctcatcaaatttcgagctcatagggtagttaagcggaaaagtgctctgggacctggagttccccacatcatcaacaccaaactgctgaagcactttacttgcttgacctacaacaatggcagattacggaacttaatttcggattctatgaaggcgaagattactgcatatgtgatcatacttgccttgcacatacatgacttccaaattgacctgacagtgttacagagggacttgaagctcagtgagaaaaggatgatggagatagccaaagccatgaggctgaagatctccaaaagaagggtgtctgtggccgccggcagtgaagaagatcacaaactgggcaccctgtccctcccgctgcctccagcccagacctcagaccgcctggcaaagcggaggaagattacctagacgcatgctttccagacagggcgttttggctgcatcacagccactggctggtcctattcatttccatttttatgtatgttttgaaaagaaaaggtccggggatggtggctcacacctgaaatcccagcactttgggaggccgaggcaggaagatcattgagctcaggagtttgaaaccagtctggacaacatagggagaccccatctctaccggaggaaaaaaaaaagagtcaggcctggtggtgtgcgcctgtaatcccagctactcgggaggctgaggcaggacgattacttgagcttgggaaatcaaggttgcagtgagctatgattgtgtggccacactccatcctgggtcacagagtgagaccttgtctcaaaaaagtaacataaggaaaaaagaagccttgctttagcacaggtatgaagccagaagccagcatctcaactgtgcttgtcttatgcagaaatataaagcgatggccaggttggacttcaaaaaaaaaa

SEQ ID NO: 475 - DNA, 3076 bp, Homo sapiens
cctgtctctcttcgggtctcgggcccttgggcgcagcggggcgcgcgccatggcgaaggcgaagaaggtcggggcgcgaaggaaggcctccggggcgccggcgggagcgcgagggggcccggcgaaggccaactccaatccgttcgaggtgaaagttaacaggcagaagttccagatcctgggccggaagacgcgccacgacgtgggactgcccggggtgtctcgcgcacgggccctcaggaagcgtacacagactttactaaaagagtacaaagaaagggataaatccaatgtattcagagataaacgcttcggagaatacaacagcaacatgagccccgaggagaagatgatgaagaggtttgctctggaacagcagcgacatcatgagaaaaaaagcatctacaatctaaatgaagatgaagaattgactcattatggccagtctttggcagacatcgagaagcataatgacattgtggacagtgacagcgatgctgaggatcgaggaacgttgtctggtgagctgactgctgcccactttggaggaggcggtgggctccttcacaagaagactcaacaggaaggcgaggagcgggagaaaccgaagtcccggaaagagctgattgaagagctcattgccaagtcaaaacaagagaagagggagagacaagctcaacgagaagatgccctcgagctcacggagaagctagaccaagactggaaagaaattcagactctcctgtcccacaaaactcccaagtcagagaacagagacaaaaaggaaaaacccaagcccgatgcatatgacatgatggttcgcgagcttggctttgaaatgaaggcgcagccctctaacaggatgaagacggaggcagaattggcaaaggaagagcaggagcacctcaggaagctggaggctgagagacttcgaagaatgcttggaaaggatgaggatgaaaatgttaagaaaccaaaacatatgtcagcagatgatctgaatgatggcttcgtgctagataaagatgacaggcgtttgctttcctacaaagatggaaagatgaatgtcgaggaagatgtccaggaagagcaaagcaaggaagccagtgaccctgagagcaacgaggaagaaggtgacagttcaggcggggaggacacagaggagagcgacagcccagatagccacttggacctggaatccaacgtggagagtgaggaagaaaacgagaagccagcaaaagagcagaggcagactcctgggaaagggttgataagcggcaaggaaagagctggaaaagctaccagagacgagctgccctacacgttcgcagcccctgaatcctatgaggaactgagatctctgttgttaggaagatcgatggaagagcagcttttggtggtggagagaattcagaagtgcaaccacccgagtctcgcagaaggaaacaaagcaaaattagaaaaactgtttggctttcttttggaatacgttggcgatttggctacagatgacccaccagacctcacagtcattgataagttggttgtgcacttatatcatctttgccagatgtttcctgaatctgcaagtgacgctatcaaatttgttctccgagatgcgatgcatgagatggaagaaatgattgagaccaaaggccgggcggcattgccagggttggatgtgctcatttatttgaaaatcactgggctgctatttccaacttccgacttctggcacccagtggtgacccctgccctcgtgtgcctcagtcagctgctcaccaagtgccccatcctgtccctccaggacgtggtgaagggcctgttcgtgtgctgcctgttcctggagtatgtggctttgtcccagaggtttatacctgagcttattaattttcttcttgggattctttacatagcaactccaaacaaagcaagccaaggttccactctggtgcaccctttcagagcgcttgggaagaactcggaactgctcgtggtgtctgctagagaggatgtggccacgtggcagcagagcagcctctccctccgctgggcgagtagactgagggccccaacttcgacagaggccaatcacatccgactgtcctgcctggctgtgggcctggccctgctgaagcgctgcgtgctcatgtacgggtccctgccatccttccacgccatcatggggcctctccgagccctcctcacggatcacctggcggactgcagccacccgcaggagctccaggagctgtgtcagagcacactgaccgaaatggaaagccagaagcagctctgccggccgctgacctgtgagaagagcaagcctgtcccactgaagcttttcacaccccggctggtcaaagtcctcgagtttggaagaaaacaaggcagtagtaaggaggaacaggaaaggaagaggctgatccacaaacacaagcgtgaatttaaaggggccgttcgagaaatccgcaaggacaatcagttcctggcgaggatgcaactctcagaaatcatggaacgggatgcggaaagaaagcggaaagtaaagcagctttttaacagcctggctacacaggaaggcgaatggaaggctctgaagaggaaaaagttcaaaaaataaattacattttataaataaggcaaggaactggacattacctcacatctgcaattccaaccctctggtctcgaattcccgacctcaggtaatccacctgccttggccccccaattataggtgtgagccacagcacccagccaaaaaagtaattttttttagagtaataatgctataatgttggtgtgattccaacctccagctccccccacccgctgcctgcggttttgtttctgttaaaacgtcacctgatgaaatagaatgaatcctgaaatgcacctctgggatcgggaatggtctgtgtgttatcagctgcgactggttcactgcgtctggacaagcctcatggggactggggattctggccagtgtaatttctgtcaaccacggacgtttgccttcatgtgtagaatttactgttgttatgcaaattatattttcaattataaatgaaaa

SEQ ID NO: 476 - DNA, 959 bp, Homo sapiens
gcctcaccaagcaggaagactgctgcggtagcatcggcactgcctggggccagagcaagtgccacaagtgtccccagctgcagtacacaggagtgcagaagccagggcctgtacgtggggaagtgggcgctgactgtccccagggctacaagaggcttaacagcacccactgccaggacatcaacgagtgcgcaatgccgggcgtgtgtcgccatggtgactgcctcaacaaccctggctcctatcgctgtgtctgcccacctggccatagtttaggcccctcccgtacacagtgcattgcagacaaaccggaggagaagagcctgtgtttccgcctggtgagccctgagcaccagtgccagcacccactgaccacccgcctgacccgccagctctgctgctgcagtgtcggcaaggcctggggcgcgcggtgtcagcgctgcccaacagatggcaccgctgcgttcaaggagatctgcccagctgggaagggataccacattctcacctcccaccagacgctcaccattcagggcgagagtgacttttcccttttcctgcaccctgacgggccacccaagccccagcagcttccggagagccctagccaggctccaccacctgaggacacagaggaagagagaggggtgaccacggactcaccggtgagtgaggagaggtcagtgcagcagagccacccaactgccaccacgactcctgcccggccctaccccgagctgatctcccgtccctcgcccccgaccatgcgctggttcctgccggacttgcctccttcccgcagcgccgtagagatcgctcccactcaggtcacagagactgatgagtgccgactgaaccagaacatctgtggccacggagagtgcgtgccgggcccccctgactactcctgccactgcaaccccggctaccggtcacatccccagcaccgctactgcgtg

SEQ ID NO: 477 - DNA, 3652 bp, Homo sapiens
ttttttttgacataatcatttttatttgatttaattgataaataaatacaagagaactgttgtgaaaccacttggcaatatagtaaattttaaagattttatttcaacttcactcacttatatttcttgggaatggggatatatacattattcaccaataaatcgctaatgctttaaatttacaattaccctatttgtagaaacctgaaagatcattccaattaaatgaaaaaaaaattgtacaaaaacgttcttttgctcttacaattcaaaatacattcaaattcacattcttaccagcagccaaaacctttaacccaaaattcagaaactgcagtcctacaagtgaacaaactagtgttttaatttaattatcatgattgttgttaacactgaaaaaaaaacatgatggctcctgaaacaagacaggttagcaactggtacagctttcccttctgggcactcaaagctttgcccttgattattatttttatttcatcttttcaaacacagacaattgctccaacttgaaagtttcaatggaattttggcatttaatattgctaatgcttgctaagatttaagatctcccaatgatgagaatcagaaaatgacgcacgactaaattaaaatcatcctaaaagacttactacatagtggtatctggtattcaatatcaatagtgtttttgaattacatgatatgtttttcacaaacatagcacctcatcaaatatctggtaaacactttgcaatcacaataagtgttgggagaccaagttccaaagacaattatgtgattcacttaaaggtaacattgtaagacaagtctcaggcataatgaagattaggaatgcagtctgctggttcccatgatctaaagggatgctcacctatatgggcaccatcctattaagacgtggtaatatgtttccaaaccaaaaaaagtcggtaagtgttaaaatggactcctgctttataaatgatctgttaaatgtacttgtaaaattaaaaaaatttccaaaatgtcaaaagagatatgattattgtatctccattattcccaagtaattctgttaaaaagatactaaatgaagtccaattttatcttgtaaagttttagtgtaaaaactaatgtactgaaattcagtaaagtttaactttcatctaaatgtaacgaaacaactattcattttggtgagttttcacaagctgtactcctgacctgaagaatcactttttttatgccgaggagatggagtagtctttgtaggagatggggacgcagtaccaggtgagtcagttcctccatcggaagtacttggtgatgatgccagatagggaactttctttcttccaaggaatcctcccccttcaaatcctcctttcttcctaaactctattttattttcattttcatcttctgatgaccttttcttggattctgaaaaaccttcagctattttatgcacttccaatccactatccaattctctcaaactttttatttctactccaggagactttctctcagatatattacattcccctgttgcccctttcacttcagcttgtattggacccaagttaccattttcagggacagctctttctacatttctgttcaaattaatagtctggaagtccctataactgtgaaagctctcagtccttcttgcccttgctaataaaggactttctctgtaaggcctcatggaaccgtaagtagctgcttcatgggtggtatcatggtgctgaagctgaaggctagaatttgattctcgtaagtggctatgctgaactacggaagttgctggactgatgttaggagtagcacagcgagatgtgctcaaatcacattgatcgagtaatttgagtagctcttcttcggttggaccacctacatccttatcttcacttttgttaaccatatccatagcagtggtcagatcccacatttgaatactgccatttgtatggcctgtgaacaagtagcgccttggtcttgagcccatcctactggatccctcacattccctccctgtaaatgaggatattgtagtacagtcaacagcctggatctcacatattctttttccagtcgatgagagtcttacaaatagtttgttggtgatgggaacaactttctggataaacacctgttgatcgtctcgctctccaaaaggtcctatgtcatttccagaggaatagctaccatgactttctgtctcctccagggatagtatcttgaatgacgctaaaggagtagaacctggctgagtagagatcattcctctgaatcgtgttactgtccacgtccggacatgattattatctgcacagactgatacaagatgcttctctgatagcatgatttttgttacgggacttcggtgaactgtgaaagtctgaaaaagctgaggacctgacccaactgtctctgggtgttgtacaatcactcgtactgctccagagctcgtaccataggcgatctcgatccagttaccactgacacttgttttgggtgtgaggtaaacactcagagcagtaatagcatcatttgaaggatcatgatacagttcagttacaagaagatcattatctttcattcgcaaggggaacttctgcatatctatgtaatatattgatccattgttacatccaagcagaaggaatgatccagcagtgtcataactagttataggaacaacatcttgaacctgccagtgctgagtgacagcattccacactcccactttccctgtatgactcgtggccaccaactggttaccaataaagaagagagcatctacaggaacacccaggctgaacactccaatttcacttccacttcccccatcctgaacactccacaagatgatgctactctctgaggcaacagcaaccattttgtctttgtctccatgtggccctccaaccacctttgcatttaaagctactcgttcgatagtccaatccaaatatgggctcgtaaacacttgctgccatcctgaagattctttgattctgtaacacacagcaaaatgggcatatgcagctacaatccagttgtgatggccagctactattagcacctttcgtggatccacaggaaatcctagcctaacagtttcttctcccgttccagagagaacaggctgtgtaccatttccccgggcttcaccttctgtagaatttagaccattcctagaatcagcagatctgactgtgttgtttattttacgactaggaatacctggtgggggcaagtaaccatgaaaaaggacactgccacaagaggaacgctccaattcttcacataagagaagccttcttactaatggagtgatcccgtaaaattctgcttcatgcctgagaacattaatactcactccccttaagtctagttcttttgtccgaagaaaatttaaaatgggtgcaaatgctgctggatctctatcaataaatatagcaccagtttcatctcgaagtgttgaaattctcccactcagcaaactggaaaaaaaagaatctggaatccacataagagtttgtcttgaggtactaaatctggtcccccctacgttcagttggacgatctcgccgctgccggccgccgccgcggggaagctgccgcagtgccctcccgccat

SEQ ID NO: 478 - DNA, 2477 bp, Homo sapiens
  misc_feature (1)...(2477): n = a,t,c or g
cgtcgacccacgcgtccgatcttaacagacgagttgtttaaaagaactatccaactgcctcacttgaaaactctcattttgaatggcaataaactggagacactttctttagtaagttgctttgctaacaacacacccttggaacacttggatctgagtcaaaatctattacaacataaaaatgatgaaaattgctcatggccagaaactgtggtcaatatgaatctgtcatacaataaattgtctgattctgtcttcaggtgcttgcccaaaagtattcaaatacttgacctaaataataaccaaatccaaactgtacctaaagagactattcatctgatggccttacgagaactaaatattgcatttaattttctaactgatctccctggatgcagtcatttcagtagactttcagttctgaacattgaaatgaacttcattctcagcccatctctggattttgttcagagctgccaggaagttaaaactctaaatgcgggaagaaatccattccggtgtacctgtgaattaaaaaatttcattcagcttgaaacatattcagaggtcatgatggttggatggtcagattcatacacctgtgaataccctttaaacctaaggggaactaggttaaaagacgttcatctccacgaattatcttgcaacacagctctgttgattgtcaccattgtggttattatgctagttctggggttggctgtggccttctgctgtctccactttgatctgccctggtatctcaggatgctaggtcaatgcacacaaacatggcacagggttaggaaaacaacccaagaacaactcaagagaaatgtccgattccacgcatttatttcatacagtgaacatgattctctgtgggtgaagaatgaattgatccccaatctagagaaggaagatggttctatcttgatttgcctttatgaaagctactttgaccctggcaaaagcattagtgaaaatattgtaagcttcattgagaaaagctataagtccatctttgttttgtctcccaactttgtccagaatgagtggtgccattatgaattctactttgcccaccacaatctcttccatgaaaattctgatcatataattcttatcttactggaacccattccattctattgcattcccaccaggtatcataaactgaaagctctcctggaaaaaaaagcatacttggaatggcccaaggataggcgtaaatgtgggcttttctgggcaaaccttcgagctgctattaatgttaatgtattagccaccagagaaatgtatgaactgcagacattcacagagttaaatgaagagtctcgaggttctacaatctctctgatgagaacagattgtctataaaatcccacagtccttgggaagttggggaccacatacactgttgggatgtacattgatacaacctttatgatggcaatttgacaatatttattaaaataaaaaatggttattcccttcatatcagtttctagaaggatttctaagaatgtatcctatagaaacaccttcacaagtttataagggcttatggaaaaggtgttcatcccaggattgtttataatcatgaaaaatgtggccaggtgcagtggctcactcttgtaatcccagcactatgggaggccaaggtgggtgaacccacgaggtcaagagatggagaccatcctggccaacatggtgaaaccctgtctctactaaaaatacaaaaattagctgggcgtgatggtgcacgcctgtagtcccagctacttgggaggctgaggcaggagaatcgcttgaacccgggaggtggcagttgcagtgagctgagatcgagccactgcactccagcctggtgacagagcgagactccatctcaaaaaaaagaaaaaaaaaaaaggaaaaaatgggaaaacttcctcttggccccaaaatagggtctaattcaataaattatagccctttaaggtaatataatattactggcccctaaaaaaaatagggaagctgtttatttccgggttgggaaaaaccatattaatatgttttaaccttttaggtgggggcaaaactaatgggggtttttgccattgaaagggctttgaaataaaagggtaaagaaatttatcccaaatgtagtaccaggggttggggtctgggaggttggattacggggagcattggatttctatgtggggaatttctataaggttggaatggttaaaaaggaatctgtattttttttataagtagaaaaaaaataaggatggtttttacagcctacacttcctaaaaaaaaagggattttttttttaggggccccgggttttttccctttggggggggggaatttaattttgggccgggccgggctttttaacaccgggggcagggggaaaaacccgggggggtcccccctttaatgcccttggggacaaaaaaananaccattgtgccggagg

SEQ ID NO: 479 - DNA, 1297 bp, Homo sapiens
cccacgcgtccgcccacgcgtccgcccacgcgtccgcttctgaccccgtcttggacttcaactgggagaatgtggagccatttgaacaggctcctcttctggagcatattttcttctgtcacttgtagaaaagctgtattggattgtgaggcaatgaaaacaaatgaattcccttctccatgtttggactcaaagactaaggtggttatgaagggtcaaaatgtatctatgttttgttcccataagaacaaatcactgcagatcacctattcattgtttcgacgtaagacacacctgggaacccaggatggaaaaggtgaacctgcgatttttaacctaagcatcacagaagcccatgaatcaggcccctacaaatgcaaagcccaagttaccagctgttcaaaatacagtcgtgacttcagcttcacgattgtcgacccggtgacttccccagtgctgaacattatggtcattcaaacagaaacagaccgacatataacattacattgcctctcagtcaatggctcgctgcccatcaattacactttctttgaaaaccatgttgccatatcaccagctatttccaagtatgacagggagcctgctgaatttaacttaaccaagaagaatcctggagaagaggaagagtataggtgtgaagctaaaaacagattgcctaactatgcaacatacagtcaccctgtcaccatgccctcaacaggcggagacagctgtcctttctgtctgaagctactacttccagggttattactgttgctggtggtgataatcctaattctggctttttgggtactgcccaaatacaaaacaagaaaagctatgagaaataatgtgcccagggaccgtggagacacagccatggaagttggaatctatgcaaatatccttgaaaaacaagcaaaggaggaatctgtgccagaagtgggatccaggccgtgtgtttccacagcccaagatgaggccaaacactcccaggagctacagtatgccacccccgtgttccaggaggtggcaccaagagagcaagaagcctgtgattcttataaatctggatatgtctattctgaactcaacttctgaaatttacagaaacaaactacatctcaggatggagtctcactctgttgcccaggctggagttcggtggcgcgatcttggctcacttcaatctccatcttcccagttcaagcgattctcatgcctcgacctcccgagtagctgggaattacaggtgcccgctaccacgcccagctaatttttggatttttagtagagc

SEQ ID NO: 480 - DNA, 569 bp, Homo sapiens
ttttttttttttgaagagagacggacaggctctcactctgtaggccaccctaggatggaatacagtggtgtgtctatggctcactgcagcctcaacctcctgggctcaagcaattctccttcttcagcctcccaagatgctaggactacaggtgcatgtcaacatgcccagctaattggttttttttttttttgtagagacagcatctccccaggttacccatgctggtccaaacacctggtctcaagaaatccttctgctgtgacctcccaaagtgctaggattaaaacatgacccaccatgctcagagtccattttcatttctgatttgagtaattttaaacttttctctttttttcttagtcaatctagttaatggttgtcaattttgttgattttattttgaagaatcaacttttggtttcattaatttcctctattctttttccattctccattttatttatgtccactctaatccttattatttccctcattcactgtgcttgggtttagtttgttcttctttcatatcctgaagtattaaagtaggttgttgacctgaaaaa

SEQ ID NO: 481 - DNA, 1570 bp, Homo sapiens
aatagagaaggtgccagaaagatccaaaacaagtggctgcggccgtcgcccaggagtcatcggacgccagaatctgtgtctccagaacgctatagctatggcacctccagctcttcaaagaggacagagggtagctgccgtcgccgtcggcagtcaagcagttctgcaaattctcagcagggtcagtgggagacaggctcccccccaaccaagcggcagcggcggagtcggggccggcccagtggtggtgccaaacggcggcggagaggggccccagccgcaccccagcagcagtcagagcccgccagaccttcctctgaaggcaaagtgacctgtgacatccggctccgggttcgagcagagtactgcgagcatgggccagccttggagcagggcgtggcatcccggcggccccaggcgctggcgcggcagctggacgtgtttgggcaggccaccgcagtgctgcgctcaagggacctgggctctgtggtttgtgacatcaagttctcagagctctcctatctggacgccttctggggcgactacctgagtggcgccctgctgcaggccctgcggggcgtgttcctgactgaggccctgcgagaggctgtgggccgggaggctgttcgcctgctggtcagtgtggatgaggctgactatgaggctggccggcgccgcctgttgctgatggaggaggaaggggggcggcgcccgacagaggcctcctgatccaggactggcaggattgatcccacctccaagtctccgggccaccttctcctgggaggacgaccatctctacccctagaggactgtcactctagcatctttgaggactgcgacaggaccgggacagcaggccccttgacagcccctcccacaggatgtgggctctgaggcctaaaccatttccagctgagtttccttcccagactcctcctacccccaggtgtgcccccttagcctccggaggcgggggctgggcctgtatctcagaagggaggggcacagctacacactcaccaaaggcccccctgcacattgtatctctgatcttgggctgtctgcactgtcacaggtgcacacactcgctcatgctcacactgcccctgctgagatcttccctgggcctctgccctggcctgcttcccagcacacacttctttggcctaagggcttctctctcaggacctctaatttgaccacaaccaacctgggcttcagccacatcagtgggcactggagctggggtgcacatggggcctgctcaccttgcccacacatctccagccagccagggccctgcccagcttcaatttacagacctgactctcctcaccttcccccctgctgtccagagctgaacatagacttgcacttggatgtcacctggagtgtcacatgggagtgttatggcagcatcataccaaggcctactgttgcacatggggccaaaaccagtaaacagccaccttcttggaaagggaatgcaaaggctttgggggtgatggaaaagacctttttacaaatgataccaattaaactgccctgggaaagggcattaggtggg

SEQ ID NO: 482 - DNA, 1774 bp, Homo sapiens
gctccaaatactgcagaattaaggatttgtcgtgtaaacaagaattgtggaagtgtcagaggaggagatgaaatatttctactttgtgacaaagttcagaaagatgacatagaagttcgttttgtgttgaacgattgggaagcaaaaggcatcttttcacaagctgatgtacaccgtcaagtagccattgttttcaaaactccaccatattgcaaagctatcacagaacccgtaacagtaaaaatgcagttgcggagaccttctgaccaggaagttagtgaatctatggattttagatatctgccagatgaaaaagatacttacggcaataaagcaaagaaacaaaagacaactctgcttttccagaaactgtgccaggatcacgtagaaacagggtttcgccatgttgaccaggatggtcttgaactcctgacatcaggtgatccacccaccttggcctcccaaagtgctgggattacagttaattttcctgagagaccaagacctggtctcctcggttcaattggagaaggaagatacttcaaaaaagaaccaaacttgttttctcatgatgcagttgtgagagaaatgcctacaggggtttcaagtcaagcagaatcctactatccctcacctgggcccatctcaagtggattgtcacatcatgcctcaatggcacctctgccttcttcaagctggtcatcagtggcccaccccaccccacgctcaggcaatacaaacccactgagtagtttttcaacaaggacacttccttctaattcgcaaggtatcccaccattcctgagaatacctgttgggaatgatttaaatgcttctaatgcttgcatttacaacaatgccgatgacatagtcggaatggaagcgtcatccatgccatcagcagatttatatggtatttctgatcccaacatgctgtctaattgttctgtgaatatgatgacaaccagcagtgacagcatgggagagactgataatccaagacttctgagcatgaatcttgaaaacccctcatgtaattcagtgttagacccaagagacttgagacagctccatcagatgtcctcttccagtatgtcagcaggcgccaattccaatactactgtttttgtttcacaatcagatgcatttgagggatctgacttcagttgtgcagataacagcatgataaatgagtcgggaccatcaaacagtactaatccaaacagtcatggttttgttcaagatagtcagtattcaggtattggcagtatgcaaaatgagcaattgagtgactcctttccatatgaattttttcaagtataacttgcaagatttaaatccttttaaatcttgataccacctatatagatgcagcattttgtatttgtctaactggggatataatactatatttatactgtatatataatactgactgagaatataatactgtatttgagaatataaaaaacttttttcagggaagaagcatacaactttggacatagcgaatacaaaattggaagctgtcataaaaagacaactcagaggccaggcgcaggggctcacacctgtaatcctagcactttgggaggccaaggcgggtggatcacttgagaccaggaattcgagaccagcctggccaacatggtgaaaccccgtctctactaaaaatacaaaaattagctgagcatggtggtacgtgcctgtactgtcagctacttgggaggctgaggcacaataattgtttgaacccaggaagcagaggttgcag

SEQ ID NO: 483 - DNA, 3024 bp, Homo sapiens
cgacgcctgtccctcttagacttgcagctcggtcctcttggcagagaccccccgcaggagtgcagcaccttctccccaacagacagcggggaggagccggggcagctctcccctggcgtgcagttccagcggcggcagaaccagcgccgcttctccatggaggacgtcagcaagaggctctctctgcccatggatatccgcctgccccaggaattcctacagaagctacagatggagagcccagatctgcccaagccgctcagccgcatgtcccgccgggcctccctgtcagacattggctttgggaaactggaaacatacgtgaaactggacaaactgggagagggcacctatgccacagtcttcaaagggcgcagcaaactgacggagaaccttgtggccctgaaagagatccggctggagcacgaggagggagcgccctgcactgccatccgagaggtgtctctgctgaagaacctgaagcacgccaatattgtgaccctgcatgacctcatccacacagatcggtccctcaccctggtgtttgagtacctggacagtgacctgaagcagtatctggaccactgtgggaacctcatgagcatgcacaacgtcaagattttcatgttccagctgctccggggcctcgcctactgtcaccaccgcaagatcctgcaccgggacctgaagccccagaacctgctcatcaacgagaggggggagctgaagctggccgactttggactggccagggccaagtcagtgcccacaaagacttactccaatgaggtggtgaccctgtggtacaggccccccgatgtgctgctgggatccacagagtactccacccccattgatatgtggggcgtgggctgcatccactacgagatggccacagggaggcccctcttcccgggctccacagtcaaggaggagctgcacaaaatcaatcgcctcctcgggacccccacagaagagacgtggcccggcgtgaccgccttctctgagttccgcacctacagcttcccctgctacctcccgcagccgctcatcaaccacgcgcccaggttggatacggatggcatccacctcctgagcagcctgctcctgtatgaatccaagagtcgcatgtcagcagaggctgccctgagtcactcctacttccggtctctgggagagcgtgtgcaccagcttgaagacactgcctccatcttctccctgaaggagatccagctccagaaggacccaggctaccgaggcttggccttccagcagccaggacgagggaagaacaggcggcagagcatcttctgagccacgcccaccttgctgtggccaagggacaagagatcacatggagcacaaattcgggtaggatggagcctgtgtggccctcggaggactgaagaacgagggctgacagccagcctggaagaccgcttggcagcccttctggccacggctgtttcttctttgtgcttcccgtgtgcctccccagtagccctcacctgcataccaacccctcctttacccacgttggggctggcataagctgcttccctgagaggacatgaggggggggcggtcctcgtaccctctcccaccctggtgtttgggcacctgcgtgggatgcacacggatgacagaatcaaggcgccaggatgggcactctgccctggatacaggctctaccctcctcccccaggacctgcctagtgccagtttggtagtccccctttctggccccttggagcccacacacgtttcatctttttcccctctgagagcaagaagagacatggcatgttctctgggaccctggaatcctaggtacccacatgtgtgccaaagcctaccccacctggcaggtgtcccacagcaacagaaggaatagtagtccccactctttccatcagccctaccctaccctcattccccgacaccctctggcttgaaccatggctgagcagtgccggcatacgctttgccggcatgcttggatgcccagctgtgtccagaggtggcctgggaccgccagttgcacgcctgccacctcagccagcccccgcccagctcatcagtctgaatggagttgccttaaattggcaggtggtaccgtactcactgcccttggagctgtgaccggctcctgcctgtccaccccttcccgaggtggctcctgcttaccttatcatcccagggctctgattagccaggcctggtcagggtcctggggacggcacccagatatgcagagtcaccctgacactggtgccgggctgacctcagctcccgaaggctcgcacagcctccccatccttccttcccagcccttgtggctctgtccacctgatcccaataccagcttcccccagcccctgccaccccagagggcggccacgacagggagaggtgtagatgccaccatctgagggagaggaacgtggaacaggagcaggctctgatgctgagaggcttgcctccgggggctggaagcctgggtggccggggcccctgaagaaggctcccctctgtatcccccaggtctcctcaacactgggctgatcctgaatggcacaggccaaggggaggccagcctcgcctttctacccaggccccctgccctgcccacctcaggcccccaccctccactcctccccacggtactgtgaacgtcgtgtgactcagtgcagagacagataatatatttaattcatgtacaaaaaaaaaaaaaaggggggcccttttaaaagaacccttggggggcccaaatttaacccgggctggcaaggtaaaatttttttccttatggggggccgaataaaaaccaacttgggaattttgggaaagaaccttttttttgggggggggacaaattggcccaacctccctccaaaaattaaaggctttagggaaaaaaaaaatttttaaggggaaaagggggaaaaacaacctccatatcctggcggttgaaaagttttctttccggggtttattttaaaaaaattttttccccggggcctg

SEQ ID NO: 484 - DNA, 1148 bp, Homo sapiens
aagctgaaggtccttgcaagaccttatctctcctgtcctttatagcatcccgccatccagagcactgccaggaacctgcatggtgagcgaatgactcccagcagtgcgcaggtgattgggccttgggaccagagtgaggctgagataaaggggagcccagggccagacccctgtcacccacattcctgtccccttccctttccagccagcccagagaccacagcagcacaagaggtggccagcttaaaaaagtttaattgctgaaaacatccaaggcaggtgcgggccagtccctgcggggctcacaccccccttattggaccatcagctctgtgatgcccccttctcctggctacaaacctgggaagtagggcagctggtcccagggccctgagactggtgctgctctagaaggcctggtggggggccagcccccaaggcccttgaccagaactggaacagcaggcaagatggggcagcgtggggtgaccaaagatcctggatgaggccaatccaggctgggaccagcccaggtcagcagtgagaccaggggagacagggtgcccagggcctgcccagggacatgctgctgaccccccgccaccctgcacccctggccacatgctagcgggcagctgatgagcagcagctgaccccagagacagcagaggtgaaaacagtccctgggaactgccagaggcccagaggatgtggaagtgcccacgggaaggcaggagtgcaggggtgacatgtgccggggccagagaggtatcttccagcttgaggatgagccgtgaggtgtgcactaggaagtggcagcacaggtgaggtggaggtgacgggggcgcaggctagtcccactcgtcctcgtccacgccttcaaaggagtcctgggggagtgggtcctcccggttccccagttttgccaccatggcattcagcagctcctccttcttttgctggtcagacttttcttccaggtactgcgctgaggatggggcccgacgagcaggggcctctcggggggcttggctcactgggctcatgtcaggaggctgcaggctgagaagccagggctgcccattagcgccttgcagccaggcctcggcactgagcacaggctcccagatcacagccgtgtctgggaa

SEQ ID NO: 485 - DNA, 1256 bp, Homo sapiens
ttttttttgaaatgaaatgaatcatttaatgagaatcttcaaactgtggcactggctgagtactaagcaaatccaggggaagacgtgaagcccaccaaggcgcacagcctcaactccggtgcctgcccctgatctgaaatacaacatccaagagctcgaggcctttttaccacccgtttgtggagcacctgcacctttctgacaacaactctcaagccaactttcagagagaaaacatgaagggaaaaaatagatttcctttggccagacagctctttcttcctcaataaataggaaccacacttggaacaaagagacagcgtgagctcggtgggggaagcacaagctttattggctgaaagttcttctcaggagcctggtctgctgggactgcatgttcctggatgggctcccccaggcctaagctccaggtttcctctggccttccgaaggattttgtgggttacgaccaattgatcaaagatgactttttcctggcgcttgctcagctgcaaaagcttcatggtgttttgcaacttcttttcttgttcaaacaattttttatgtagtttggtgacctctgccttcatttctccaatctgctcacagtgaagggggcactggccatcctcggggagtgagactctccagagaagcttcagccgcctgtaggcctcttccagggtcagcttggccgtgctcacactgctcacaaacttgctcagtggtgctgggtgtggaccctttgttcccagctcttgacttgtggagctgggagcctcttgggtttgaatgtccatttcagcaaggagcctctgtccctggctgatctgtttgagcagggcctcatagtcctcaatcaggcccaggacatggcggccattcttgctggcccacaggtggtggccagtgaccaggcgggacacacacggagtgctagttgccgaactgccactgtcgcaggagagggagtccgtgtcattcccagagagtggaggagtctctgaaactgtaaaatgagaagtaggatgtaaaatctgtttcaggtaacactctgcgttcaagacgcttatgatgttgaagctagctaggagggctagaagaggccctcgtgcccaaatgccacccaacacaagcccagaggggaaaagaggcacgctcctggacctctgtatattaccccacactgggcttatgagtcatcttgtaggagaggctcaagtcaactcaaccaacacttatcaaccacccactcg

SEQ ID NO: 486 - DNA, 2547 bp, Homo sapiens
ttttttttttttatatatatatatatatttatttatttttaaaaactccaggggatgtcccaaagttagtaaacagttctgtttcttgtcccttttatggctgcatgcagtttcaattgttcagtacaacagatgaggcatttaaaaggtctccaacgtcaagaaacactaactcatctctggcatatcatattttttaaggcagaagtattttctgtaatggttactaccggaggtgtttactgggttaatttttaggttaaccaggaaccacacatcccataggataattccatttaactgaggtttatatccgtaagagcattaccatagaaaaatttccctttagcaatttcaagagacctcagccaccaatatacctaccttctttacaatataaagtgaaatattactttagatgaaaattttttgtatcttacttagaaaaaattaagttgatatttaaaagaattttgatttttaatcaccttccacaacgatttgatataccttaaactccactttcattttttataagagaatcactttcaagggaaaaaaatggatgttactatattttaaaatctgctttataaaaaagtgtataaatgtcaatctgccagatatacttcctatccccaacacagctgtaacactgactaatggggtcatgaccatgaagcaaattttacttcctaaatagaaatgtgtaggtggcagaaagcgtatttttcagcaggagtgattctgttggatctctttacaatgtcagagcagttgttagaaatgttagtattttattcggtttcttgctgtgaaggattatcacaatgttgaagtgatggctgttcacccagtcgtcatcaccgtcatcatctcaatcttgggaatcatcagcagtgtcccccacacagagagacaggtatagtggtgcagtttagtgacagggaatccagtcttagatcctgtttatatcacatttttgtgaatttacacaaaattccatttatagctttaaaactgtactacataacacattactatactactacaaaatatccttctctataaatgcactgaatattttcttgggcattttattaggccttttttagcattattacaaatgctaacaacaagatacttcaaaccaccaaatataaagtcagcttcttaattttctgaaatttagttatttgagttaataagaattctgtaggaatactgacccatctcttttcatccaaccttcaaaatagttaagcctatttgcccatctcacctaaccttcaaaatagttaaaacaaaaacaaacccaaactagctatatataacaagaatctttcaattcccaaactattgaaagaccctaagtcagccaatctatgaaattatacaagatgaaggtgaaaaagctgtgcttttttttaaaccattaaacccagttcttttctcttaaagttgtaagaaaatggaaaatctgtttttaaatcatgcaaagatttaaataagcatttttctatctgctctaagaaactgtttcttatcttacaattttaaatattcataacactcaaactacttttttgtggccatttatgtttttgacactagattgtatggtattatttagccaagatgtattataatgctaaattatgtataaaatatgatttctggaatttgtccatcttctattgaagtgccattattattgccaggggaactaaaaaagaaaaaaacagtcttgcttgcagcaggtgtctcatgcactactttcttcaatccttttgtgccatagtgggaatctggacctttgagtgttgcacatgctgtgtagcacacattgggcaggatctctatgggttccttgaacatgaccctgaatgtgttagctgtcccatcacaactaaagccggtatcattctgtcccagggtttgctttttctcatattcaatgatctgtatattcacttgataatctgtagggccatgaatagatccatacaagccaaatccaactatagagatccttctattaactgtgaatctgattcgatcactcgtcccactgtaaccccagcggctttctacttgctggaatctattgatgcagcattcctttcccctgagacagcatcttggtcggtcaatgtattcaactcggggtttagggttgacagtaaaatgaagaaagaggtttaccacttcacgatctgacaaaattccagattgagcaggacctgctgcaaattcctcaattgtcatcagtgggaaccggattaaggaaagtgcttttcctagaactttttgtttattcccaaaagtcacaggtaattgttgtctctgacattctgcttctgcccagcgtacaacagctccaaaaagtcgactttctcgaatactgagtgtgtctctctctaaaactgcacagagtgtatctataggcaaaatacaaaataaacccaattagaaatattttagctctctaaccaagcaataccaacagacacacttatattaagttttcagatctcaacaaaaaat

SEQ ID NO: 487 - DNA, 1228 bp, Homo sapiens
  misc_feature (1)...(1228): n = a,t,c or g
tgcggccgctgttaccacctcagacactggtctaagtccagggcagcctgggatccctactcctcttgaccccaaaggccagcaacgtgggctgacacccctccccggggcatctttggacgggtcctgcatccagcagggatgtggtcatctctgtcctctcagggcctgggagccagcgggtctggccgagtgttagggtggcttcctggtctccttccttagcagggagctggccacagccaaggcgcccccctgcacaaacctcacgaagttgtccccggccagcggccccatggcgtacaggccctcctggcgggtgctctggtaggtgaaggggtccacgtcaatggggttcctcttggcgctcagcggctggtcaggatccactgcaaagtcagcccctgccccaggcaggaaggagaggtcggggtgggagccgatgaggaccagcaccagggagaccccaaacaccttctcgacaccctcgaggtcctggaacacggcctggcagtcttccttgaagcacagcagctggtgcctggggaggctgcggtaaccctcataggggctgggcgacaggatggactgctcccgcatcatctggtgcaccttgtggtactcggggtacagcatcttgggcagctggttgaacaccaggccagggtcgtccacggcccggcggaaggcatggatcaccgggatgttgtagtggcgggcgtagaggaccgcgtcggccgctgacagccccgcgccaatgatgaggacagggtctgaggccggggtcaccgcacccacccttgtggcggcctccagggcagacagctcatggtggatgaagggcagggcctccccggggatgcccagccgggccgggctgtcgaacgtgcctgtggcgaggaccacgttgcgggcccacagcgagaagggctgctgggcctggttcctggtcaggaagccgctcacctggaagagggggctggagtcctgggccccacagctgctgggatcgggggtcccccactccacggctgtgactacagcaccggacacaaagttatgccccagacccttcttgaccacgtagtccctgtagtagtgggcgatgtccccggcagtggcccggctgttgcgaagacctcttcgcttcttctgcatccagtccttgacctccgaattccaccacactgactagaggtctacagtgggnntcaggncnggaccccct

SEQ ID NO: 488 - DNA, 1410 bp, Homo sapiens
  misc_feature (1)...(1410): n = a,t,c or g
ttttttttttttacttttacataatctcatttaatttaaccctcacaacaaccctgtgaggtaggtatttgctccattttacaaatggagaaatcgaggcacaaaagattaaacatcttaccaaagtctgcacagccacttatatgctggagctagaatttgaacccaggtgtgcctccactttttaatactagaccaatcttttcacgggggaagtttcctagattaacaccctcacatcttttaagaccattccaaaacctgcgttctgttttgcagaagccctcactgtgtttctgctgccctgaaacagtggaggcagacaaaggtgagtgccaagtgaggaaccataagaagtggtagatctctgtggagtgccataagaaccctcaagagccttaacaaaggtagttgggggagaggggaagaggtgtttcagcagctctgctcccagcagccatttcctctctccagggcaaaggggtggggctgcgaggccagctgaccaagaaacccctccagctcctccagtccaagtccagcatctttcctacaactattctgccttccacttcgtcttcttccttgcctcactctatgtcatggttacccttaccaactggttcaggtaagatggagtgggccttagatactctcctgaagagctagctattttaaggaaagagcaattcaaggccattccagacacacatgggtctgccattatatttggtgaggaggtagaacaggtctaaaagctaaggcccttcatattctctaaccagagcctttggttacacagctatgagggagcagaactggaaaagaccttcatcaagggtagctgggccaccttctgggtcaaggttgcctcatgctgggcctgcgtactcctctatctggggctgttactggcaccactctgttggccccccacccagaaaccccagccccttatcttgaggcgccgccgccaccgcatcatatccccagataacaaatatcctccagtctaagtccttttcacaaactggggttcccctgacattgtactcctagagttggctcaaggggagctgtccagcccagctcaatacctcaaggacacacagggagttatctccgtttgggctgaagtcaatactatgaactggaagaagtggtcaaacacagtctaatgtgctgggcagagtgtctgactcactggagctactgttacatctgcatcccagctcaagagcctaacacccaaatcagcagctcaaagaaccaccgctgatcccagcagacagtgtgcaccagccctttcctggctcttgggcttcttatatccgtgtnccagggctgaactccttattttcctttctccanaggcagagccgagtcttcagtccctgttggtctttcccc

SEQ ID NO: 489 - DNA, 1050 bp, Homo sapiens
caattgatacacctatcacatggataccagattcactggactgactattacaacgtcgggactgggagaccagaattcggcacgagggcagcccacaagtccctggccggagcagagctgaagacgctcaaggactttgtgactgtcttggccaagctgttccctggacggccgccagtcaagaagctgttggagatgctgcaggagtggctggccagccttcccctggacaggatcccctacaacgccgtgcttgacctggtcaacaacaagatgcggatttctggaatattccttactaatcacataaagtgggttggatgtcaaggaagccgatctgagttgaggggttacccgtgttctctctggaaactgttccacactttgactgttgaagcctcgacccacccagatgcactggttggcacaggctttgaagacgacccccaggctgtgctgcagacaatgaggaggtacgttcacaccttctttgggtgtaaggaatgtggtgagcactttgaggaaatggctaaagaatccatggactcggtgaaaaccccagaccaagccatcctctggctgtggaagaagcataatatggtgaacggccgcctggcaggtgagaagcccctgggcatggggggctcagcacgggcggagggaggccctggtcctgggacagcaaggacggcacggctgccgtggggcttgtccctgagctttgcggcctcgtgccacccactgtgctgacgggatcaggacttgggtggctgagagctgccagagctgcagcctttcccaggctgcttctgtccccggctttctagatgcttctctcactccgggggctcttcgaccccgtggaaatgggtgtggctctttcttcccccatcggtacccactggtagcccgttagactctgaagatgtttttgactctggaaagcttggaacgtaattaatttttgatgaggaattttagtagtatggaaatctgttgtccaaacgtaaaccaaacctctcaaagtgctttgttttgttaaaaaaaaaa

SEQ ID NO: 490 - DNA, 4797 bp, Homo sapiens
ttttttttttttaaagtttaaacaccttttatttgaagaaatattgcttctagactttcctgaagccagaattgttctataaaagtatcatggaatattatacatgattaaaaaacagagtatgcttcctaataacttgaaatctttttacaaagcacattattcatgatcataaatatgtttgttctgtcatcccaccgatgatacacacatcaggcaagcagctaatttgaacatatgtacagagtctatgataaagatttaaagttaccaaaaagattcagctataacatattaaattttctttaaaagagtttaccataaacacttaaagaaaacataatttatctaagcacttgaattatctaaaaataagaagaaaacctctcttagggtaagcaaaaacacatcatcttggggagctgaataaaagggtactgatgactcagtgaggtaatccctttagctggtatttaaaaacctaatacacaacaaggatattttcaagaatacagattttcaaaagcaattttgaactatgtctttaaaagatatcagaacttggtgaaggtcttacaaataatcatagaacacaatgttaagaaattaacttctcttgtggtatgttgaaattgtggagcattcatgattttcttttattgagaagttcttggtgtaaattcaaaactagtcatattttatcaacatttaagcttcttagtcatgccaagaaaaccaaaaaagatgaaaataaaagatctttagatctttttctcctgtcaagaaaataacccaaaatatagcaatcttaaaggtatgatgtatgatgaacgctttgaggctaggcacagagagagcaggcaatcttcattttgtttacttatttatttattttcaccaccaacattattagccatgcctttctgctaatcgattttagcaagtcgaggtaaaacacatgcaacattttctggcaaaagcttaatgtcaaacaatatgtgatccatactgtgtgtcgtccttgggggtttatttgactttgtcacaatgacagccaacagtgagactgataagcctgtaaaaataaaaaaataagactaatcaaatagacatggcattttaatctcaaagtgcaaaatcatctaactgaaaatgacggcattgaaaaattccagtggttaaaaatgaatcaaaacttcattacgcaggcagtggaagtgtgttgaaagatttaccaggggtgtcaagttttagacactcagaaaggcaccattctagccatcttgattggataacatgtatatacttatgtccctacgatattcaaaagataatactgttttagtacaaaacaaacaaacaagcaaaaaatcaaaaccaagccaacccaaatatccccagcctttctttctactcttggcagatagtaaattataacgatgagtctccgtgtgcacaccgcttgctcacatgctcactagcttctactgcacaaaggtacccagggtagcttggaatgttggtggctgtgattacctttattagtttacaaataaaaaagttaaaaagaaatactgtgtttagggtaaggtaacagtttccacctaatcaagaggagagtgaaagaggaagcgctgccttcctaggtgctgtgacttctccttttcgtgattcttctccaccttggtcaacatcttccccgctatgctggaattacttcggtgttctgcggtggccatggtgaacatctgatgaactgaaattccatcggaatgcacaggaagatatagttgatcttcaaaaatgtcctttccaggaccaccatactggggaagttctttcgggtgcctgcgaatgggctgcagcctggggctgggcccgagctctagctctgtcatgccatcgccactgaaatcggtttccagatgattagtctcttcatgccccgtccatttttcggtttttctccagtgttcagaattcaaatgattaacttctggaatgtcgttattccattcaagtttactctctggacttaatgttggtcggttcaaatgcagggtttgaaggtcagctggcaaggtcaaatgaggtgttttcccaaccttatgccttgggtcttcatctgagtcagcagaggccatctccattgacacagcgtgctcagcagagacaaccaagaacccgtcactttgagcagtttgagtcttatttgttttattttgctcatagtgactcttcagcagtgcaaatactctatctaaatccttcaagtaattagtccagtccaccagactaagtctgtagttttgtctgtactcatagatgttttcattcacactgtgtagctcctctaggccttgccagttgatgtctgcagtgagacggggctgattaaccttcccatccatcccataactgtcctctgtgtaggtcatagcttcctccatctttatttccaacatcaagattcttaggtcttgggttgcactgcttatatccttgacagcttctgagctccattagttgtacgtgtagctgattcaaaatgcctcgttctaccgtgtgcactgtatttgtgagctgataaggatctgtattcatatcaaaatactccaaaaagccagtagcaaactcacagaaaagaaaattatgcgtctcattaactgtacgcaaacaccagtaggtgttattgttagaactcgtgcaagcacagaaagatcccaggttccagaacggggctgtctgccagtggttgttgtcatgcgtgaagcaagtgaggccaggcaggctgcactcttcccccttcctctgccgtctcttctccttcctctccttcttcctcctacggttgttctccttgaaaagttgcagtttgctatctacttcctgagcagcctccttgaatgggtgaagatggctctttaatttctcttgcttttttacacctttctctttattgtaatagctttgtttactgcagctacattcctcaggcttccttctcttcagatgtcctctcacttctcttaaattcttaattttatcttgcagagcttcaatctcttcgtcaatgtatgccttatggtccttccacgctctggccgattggtacagttctctctcacaatggatagagtcattgggaagaataaaacacttgtgtgtcactcggacagtggtaggtgggcccacggcgttgctgctatctgccagcatcctgcccctgttgccaccactggaagcctggagatctcttggccccttgtggccttcatcatgacgcttagcaatgtttcttggttgcaacacttgcaattcttcttcttcttccagatttatgtcatatatttcaccttcaaattcgacggacaaggaacgtgtctgccgagtatggacaaatctgggcttgtactttggagtcccctggtttctcaagaattgccgttgactctttctttggcttctgctggcacggtaaccagactccctacaactgcactctttgtctttgtcatggaagccgcgagcgtagaggttccgcgtgctctgccggactgtgagcaggtcactgggtcctttacacttgtgaattcgaagcttgccagatgtatcctcaatgcattgccacttctgccccggttgttcacaggctgtctggtacctggcctgctggcatagttctttgacccgttcatatttgggcaagtgatttgactgttggatattcttgctggattcttccttcttacgtagaaatttgcctctttccactaggaatgtatcacgccaaattttggccttcttgtttgttcgaaacctgttacctggcttttctgggtccagaagtttgaggacagacttgccgtccacatcaggaggtgtgtcgagcccagcaatatccaggatcgtgggggccaagtcaatgttgagaacgatctgtgggactattgatcctggttctacacttggaccacgaataaaaaaaggcacacgaatatcaaagtcatatggcatggatttccccttgaccagtccaaactgcccaatatggtaaccatggtcggcggtgtaaatgatgtaagtattctccagctcccccgtctccacgagcatgttatacagcctctccacagaatcatccactgacatcaaagtctggagccttttgcgctgtagaatgtttgtaaattccatgtggatgggcagcattggtcctgtgtactgcataatccagtgtttatccatatttggtgcatagttataactaggagttatgtgttgggaagcattggggtacagtttagaaaactgtggggctgagtcctcggggccgtggggctcggcgtggctgatcaccatcataacgggcctatggggatacattctcttagacattttgaagtaattaatgctctcgttagtgattaagtctgtgaagtagtcctttgcataatcaaatccatgcttttctttgatgccattgcgacaaacagtgtaattatagaagcgagaattcttgattaatccaagccattctcgccacccaggggggatgtagctgccattatattcattgaggtattttccaaaaaaggctgttctgtagccagtgttgttaagatatacagcaaaagtccgaggctcatgcatggcctgccacgagggggaagagcagttctcgttgttggtgtagacattgtgattgtgcacatacttcccggtgagcatggaggaccgtgacgggcagcacatgggtgtagtcacaaaggcattgatgaaggtggcccccccatg

SEQ ID NO: 491 - DNA, 2480 bp, Homo sapiens
ttttttttttttctcacttggccgactttatttttcaggaaaaacagaaaaacaaatgtacctcttgggttggaaaggacccattgacaacatggcacagacgtgagcaataaatacgcacatacattcaagtatgcgggggggcgctacgtcctggagaccctgtgttcgggcacctgtccctgctctcgggtgcggccctgcccctccagaagcaggtcacctcaccaggcccagatctgcctctccatcctagcctgagagtggggcctagaggcaccctcctagatggaactgccagccctgggggctgtggggccatggtagggcccttggcagtcttgggaggtgccaaggctgggtctggacaggaggaggcaacctcaggcccctggggcccatctcaggctccagcaggtcctgccagtcctaggatcccgaacttggtgccctgtgagccccctccccatggagagagcagtgatgtcatctcccccagctggtgggaggaggggggttctcatatggggggtctgcagggttgagctgagtgaagcctccccagcttccactgaccacccccccacttgggtgagggtcacagagcctggtgctacctcccaccctgactgggcactgctcttgctgccagtaagcatccctaggaccaggccctgccctttttcctggcttggggttttggaatgtcgaagttcatgcccagccattccctctgctttagagataggcccggctcctgtcgaggcccctgcagggccctgggactcggcggggggcacctcagggctgccactgcagcctggtctgccatgcgtggtctggggggccttctgtggttgctgacctctggccggggagtggggagacaggcttggagggagccctgccccaggacgaagctggaggggtggagcatgcctgtcacacggccatcccaagaccagctctggggggacagaacatggccctgtccttggtggccccaagaggcggctcagagacacctttggggagggtgagggagacagcagggtttcacatttggcagggcagggcagaacgggaagggcttgggggagaggatgcgggagtctgacagcaccaggtcggggccgacatgccgaaggccccgtccggcctgcggcaggggcagaagggaggaagctgagggccatgggggccagcccgggatggaagcacgccctcccaccacgggcagcttggcctgagcctgtcgccctgggtcggggaggccgtggggctgcatgcccagtgcctgtcctcggcaatggcctcgggaggacgtggctgtgactgtgagaccggcgtccaggagtgggggcagggtgggcctggcggtgggcacagggccttagctcgcaccaggctggcactgctgctggggctcgggcgggccgcctgccccctgctccgggccccccggcgaggtccacccgctgctcgtccatgcgcttagcctgcaccctctgaatgaggctgaagaagtcctcgtccggcatggtagggccccggggcagtacgtcaggtggtgggcagcgctggtcatcgatcctggaggactggtacttgatgagcatgttgaagaagtcgtcccccggctcctggggctcgccgtggcctcggaggtgccctgcattgctgtgggtgattcgcagccccggcaggctgcccacgctggcccgctggtcgtccagccggcggctctgggagctggcgatgaggtcgaagaattcctcggtctggggcgaggccgtcatcgagggctgggcgatcctgtcctccagggtgggggcggccgtggcctcggcagccccggcctggccatcgtccaggggacaacgctggtcgtccatgcggctgctctggaacttggtcaacaggtcaaagaagcactcctcgtccgaagacggggccctcgggatgctcgtgcgtggcacgtgcacccggacgtcggcgctgtccagcggggagtggctgccctcccggggcctcctctcagcgtccgggccttcctggtacttcctgctcctcacggggaggggtagcgagtccctgctgggcccccgccagtcccctgaatggtggctgtctccattctgctcccgctccagggggagtctcagcaggtcccaggtctccgcgctcagcctctgcgtcctcttgggtctggccccctgggcctcatagccggccaggtcaggcttctctgaggctgccgggctggtcaggcggccgagcaccagctgcagctgcgccacgttcatgcgggccgtgagctccccatggcggtccccgatctcctgggagatctgcaggtgcttcttggcgaaggtcagggcctgcgctgggcgccccatggacacgtaggcatttcccaggctccagcacgcccggccctcgcccactctgtcggccagctcctgggcaatgagcaggtg

SEQ ID NO: 492 - DNA, 738 bp, Homo sapiens
ggaattcggcggccgacctggccatctttgccctttgggggctcaagcccgtggtctacctgctggccagctccttcctgggcctgggcctgcaccccatctcgggccacttcgtggccgagcactacatgttcctcaagggccacgagacctactcctactatgggcctctcaactggatcaccttcaatgtgggctaccacgtggagcaccacgacttccccagcatcccgggctacaacctgccgctggtgcggaagatcgcgcccgagtactacgaccacctgccgcagcaccactcctgggtgaaggtgctctgggattttgtgtttgaggactccctggggccctatgccagggtgaagcgggtgtacaggctggcaaaagatggtctgtgagcccgggctgcctcctggtggtggccattgtcccccatcggcccctcagccttgcaccccagcactgagaagctacatttccttcctgtgctctggactgctgcccttgtccccgaggagtgtcccgcgcagccacacctggcaacagcagtgtgggctgcagggctccgtctgcacgtggacttgccctggaccttgagtgtggccctccctttctgggcctccccaggtgaggcctggccctgccccaccatgacctgggtgctctgagcccacggttcccacggagctgacttctccggggtgcctgtgccctacattaaacccggcgtttgtttca

SEQ ID NO: 493 - DNA, 574 bp, Homo sapiens
caagaaagcggcttcagctgtaaaggacctggccagaatgtggctgtgaccagggcacaccctgactcccaagggaggcggcggcggcctgagcggggggcccgaggaggccaggtgttttacaacagcgagtatggggagctgtcggagccaagcgaggaggaccactgctccccgtctgcccgcgtgactttcttcacagacaacagctactaagcagcatcggacaagacccccagcacttgggggttcaggcccggcagggcgggcagagggctggaggcccaggctgggaactcatctggttgaactctggtggcacaggagtgtcctcttccctctctgcagacttcccagctaggaagagcaggactccaggcccaaggctcccggaattccgtcaccacgactggccagggccacgctccagctgccccggcccctccccctgagattcagatagaatgtgacctctaggcatgatttgctaggggtgggagcagcatctttctgtcaccattgtgtgaacagcagggtcagatgttcctagtgatatcacgggaagccttgtttc

SEQ ID NO: 494 - DNA, 1179 bp, Homo sapiens
  misc_feature (1)...(1179): n = a,t,c or g
acgtaattgtgcatgcgcggcccatccgcacgcgggctagcaagtactacatccccgaggccgtgtacggcctgcccgcctatccggcctacgcgggcggcggtggctttgtgctttccggggccacgctgcaccgcctggctggcgcctgtgcgcaggtcgagctcttccccatcgacgacgtctttctgggcatgtgtctgcagcgcctgcggctcacgcccgagcctcaccctgccttccgcacctttggcatcccccagccttcagccgcgccgcatttgagcaccttcgacccctgcttttaccgtgagctggttgtagtgcacgggctctcggccgctgacatctggcttatgtggcgcctgctgcacgggccgcatgggccagcctgtgcgcatccacagcctgtcgctgcaggccccttccaatgggactcctagctccccactacagccccaagctcctaactcagacccagaatggagccggtttcccagattattgccgtgtatgtggttcttccctgatcaccaggtgcctgtctccacaggatcccaggggatgggggttaagcttggctcctggcggtccaccctgctggaaccagttgaaacccgtgtaatggtgaccctttgagcgagccaaggctgggtggtagatgaccatctcttgtccaacaggtcccagagcagtggatatgtctggtcctcctagtagcacagaggtgtgttctggtgtggtggcagggacttagggaatcctaccactctgctggatttggaaccccctaggctgacgcggacgtatgcagaggctctcaaggccaggccccacagggaggtggaggggctccggccgccacagcctgaattcatgaacctggcaggcactttgccatagctcatctgaaaacagatattatgcttcccacaacctctcctgggcccaggtgtggctgagcaccagggatggagccacacataagggacaaatgagtgcacggtcctacctagtcttttcctcaccttcctgaacttcagacaacnattggccantctcccactggaaggctgtatcccctcaaganggagccaaggaatgtttttcccctggagatgccacactaattaattttccccatatggtttaancaaccccttgggtgaaaaaanccaa

SEQ ID NO: 495 - DNA, 900 bp, Homo sapiens
atggcttctgctgcctgctccatggaccccatcgacagctttgagctcctggatctcctgtttgaccggcaggacggcatcctgagacacgtggagctgggcgagggctggggtcacgtcaaggaccaggtcctgccaaaccccgactctgacgacttcctcagctccatcctgggctctggagactcactgcccagctccccactctggtcccccgaaggcagtgatagtggcatctccgaagacctcccctccgacccccaggacacccctccacgcagcggaccagccacctcccccgccggctgccatcctgcccagcctggcaaggggccctgcctctcctatcatcctggcaactcttgctccaccacaaccccagggccagtgatccaacaacagcatcacctgggggcctcctacctcctgcgacctggggctgggcactgtcaggagctggtgctcaccgaggatgagaagaagctgctggctaaagaaggcatcaccctgcccactcagctgcccctcactaagtacgaggagcgagtgctgaaaaaaatccgccggaaaatccggaacaagcagtcggcgcaagaaagcaggaagaagaagaaggaatatatcgatggcctggagactcggtcctgttgctgtcctttgccctcatcatcctcccctccatcagcccttttggccccaacaaaaccgagagccctggggactttgcgcctgtacgagtgttctccagaactttgcacaacgatgctgcctcccgcgtggctgctgatgctgtgccaggctccgaggccccaggaccccgacccgaggctgacacaacccgagaagagtctccaggaagccccggggcagactggggcttccaggacaccgcgaacctga

SEQ ID NO: 496 - DNA, 4235 bp, Homo sapiens
tttgaacactgcaaaaggcttttattttataggcaccactgcaaaatgaggaatcacatcaaaacatatcaaatagaaaataataatttattttaacttcattttactgtttgtaactaatcatgattttgtgaacttgcctgtataagtctgtaccttcaaatctacaaagcaaaagtttactacaatgagcacttaaaattccacaaaccgtctccatccacaactttcctgtacatgcaaattctttcagtgggctgcaatatttgcaaacatgctttaaacttccataaagatgcaagatattttgctttctgctaaaacctttacactctcttgggaaccttaaccaggaaaatgtttaaatgtatatcccaactctaaacgctgccggtttggttatatgtattaaatcgttaaccaccgggttgggtggttttgagttgaaaccttcacctaaatgataatatcttaacggtcacgcatatgaaacacattcagtaacgtaccattataaaatagggttccattaaaaatacatactggcagttgtatttgtgttttaggcaggaaaaaaagcgtgtttaacttttttatatgaatatagtttaaacaagttattctgtgaaagtatgcttaataaaagatctttctgaaatttaaacactttatgtaaaagggtacaggtagaaaagtacaattgctatttgaaaaaagctctgtttgttaatattgccttccaagatagtaagggtgtttttctctctcttcccttaaaatagacctatgacacccagagttgtagggtttgcaaatttggactataaacatgaagaccgtacttatcttatatacaaaaacttgccgcattgaacgaggcaggaatttctaccccagtggtagtggtctcctttatgtacataatgcagaagtgaaaattatacagtagtcaccgataggaaggaattgtatactctagtgccgtccggggattttgtgccgtgggttaagagttcttggatcgtcatccagttatcgaagattttcttattcctcttcttcatcatctttttgtggctcagttcgagaatgttcatctccttcctgtcatcggctgcttgctgctccttgagacaatccaacctgctctgcatcatgaactcgcgccgccgccgctgctccttggccttcaccaggtgctgcttcctctcctccttgctccagtagcgccccatcttcatctcgctcaccgcgtcgtcgtcggtggtcatgccgctgcgctcttcccggatcttcagggcgcgctcccgcagcaggcggtcccgcacgggcctcttggtgatgtagcgcgtcccgtcgctgcggatcttcaccttccactccatgcgcggctccgacggggtgggagagctcaggtccttgcacatgctcaccaggctcatctggctttgcgcgtactccacggccgacttctgctggatcagctgcatgtagctctggtagtgctgggcgtgcgccgggatgtgcgcgtgcttgtatggggagtggtgataggagggcaggtaggcgctgcccagcttctggctgggcgtggggctccggctcccgtcgctggctctccgctctttgctttccaggggctggttggggtccagctccttcagggacgggctataggtaggggtgcccacttcgggatcttccgtgatggagagcagattcttggaggctggcccgtaggcttccgtggtccccacagccccttcgctgctcgggcagctgatgccctccgccgctctcctcaaggagttgtcgggggagatctccagggtgagcggggtgctgcggcagctctcgcctgtgttgtaggcgctcgagctgtccttgtcggatttctccgggagctcggtgatatctgagagctcgtgtctgcgcacgtcgatgctggtgttgtagttgcggaagccgctgttgtgcagcatccaggactcgcggtactgctccttgagctgctgcatcttgtgggcgcgcacgatgctcaggcactccagctcgatgctgcgcagctcttcgttcagcagctccagctccttgtccacgctctcagggtcactcttgccggcgtccagggggccgctagggtagtacaggccgtaaggggtggcgctcttcacctggcacttgagctccaggagctcgcggaagcgctcgcactcgtccaccgggatccccaggtaggcggcgcccgtgcactcgggcgaaatgaacgacttgttgctgaagggcaggtcgccgctgcccaaggtgtcctggctgcaggtgagcttcctctgccccgccagcgggttggaggatgcggtggcgtcgtcgccattgttctcttgctccgagctctcgtcattacgggtgctctcgtcggtccgccccacaccgctgtccttctcgtgctggttggacaagatggtggctgtatctgtggtcccaccgtcttcgtcgtgcttcttctgctgcagcacgctagctgtgaattgcatggcctggtggtgctgctcctccagcatgtccatgtgcaggtcatccagaaagtcgttcctgtcatcatccatccagccctcatccagctggagttcagcccttgcaatcagcaatgaaaagtttttattttcttcactggttagaagagccacagcctcttcacggttctgcacctctatcccattaatctggataatgcggtctccttctcggatgcgcccatccttggctgcaatgctgttagggtcaatctcactgatataaatcccaatgtcgtcttcatcgtccgtccggtagcacacagtgaggcccagcttgtcctggctgttcattctgtagaggtccacttcctccagctccagctcctccctgtccatctcctgatggatgtctccaatgtagtcatttggatcgtagtattcatgggctgagggatgctcctctggcaagagatagggatccagcacgggtgggctgggagaggacatcttagtgagggccatgatatgttcaaaggtgatgtcggtttgggttcccgtgtccaccagctgagactctgatggaggcgtgaacattttggtccttggtgttcttctcaacacctgcaccactatgggctccttggctgtcttgaaagcttccacagcctggtcatgagttgctctggataagtctctgccgttgacctcaataatcctgtcatgaatttgcaggcctccttccttggctgcaggcccactgtcaactatcttggatacaaagattccttcactggatgatccatcgtggttatccacactcggccggccaccaataatattgaatcccagggagccggagtcccgatgcaggacaagagtcagacttttggtttcttcgcccttgccgccgggcggcgcggccacgcagcggctgagcgagtcgaggcgcgcgctgtattcggtgaatttcttctggtagcgcagcgcggtcatctgcagctcaagctgcgccgcggccagctgggccaccagcgacttctcgcgcttcccagcgcgcagcgcctccttcttgagcgccttgtgcagcgcgcccaggcgggcctggagcgcgccgttgtgcgcccgcagcgctcgcgcgcagcagtggccgcccgcgcgctgctcgccgtgcgtcaagggtagcccgcagccctcctggcagcggcccactggccgcgcgtcgcacgcgtcgcgcatgtgcgcctccacgtcgcgccgcagcagcacctggccgcaacccgcgtggcgacagcgcgcgggcgcgaagtcgcagcgctcgaggtgctccggcagctgctgcagcttgaccacccggccgcagccgcgcgtcgcgtacgcgcacttgatgtccagcttgaggataaggcgcttgagcggcaggacgtggttgagctctttggccgacaggcgaccgcggcagcgcgccgggcagctgccctcctgcaccacccagggcagcacgcagccggcgcagaagacgtggccgcacggcgtggtcagcgggtcctccaggaccttgtggcacagcgcgcacttcaggtccgggtccacgtcgccgtcgaagcggtccagctcgaagcccatggtggcggccaggccccggggtcgccgccgggcggccgggcgccccctccctccccacgaggcggcccagacaggccggctacgccgcccgcgcgc

SEQ ID NO: 497 - DNA, 498 bp, Homo sapiens
ttttttttttttagtagagatggggttttgccatgttggccagggtggtctcacactcataggctcaagtaatctgcccgcctcagcctccaaaagtgctgggattacaggcgtgagccactgtgcccggcctgacttcaaatcctgtgttgaatagaagtagtgagagcgggcatccttctcttgttcctgatcttggaggcaaagatttcagtctttcatctaaaatgactgaaagactttcagccatgggccttgcatgactggcctttattttgttgcagtatattccttctcttcctggtttgtggagtgttttaccaggaaagggtgttcaggctgggcacagtggctcaagtcacacaaaagtgtcaagtcagccctgcccaagggccccagtgcccatcttcctgctgaggggctgggcctcaccttggctggctgggcccctcccacctggatccctgcagaccccaccgcactcagcctcacacgaaa

SEQ ID NO: 498 - DNA, 421 bp, Homo sapiens
ctcgcaggccgcaaggtgctgctcttcgtctcaggctacgtcgtgggctggggtcccatcacctggctgctcatgtctgaggtcctgcccctgcgtgcccgtggcgtggcctcagggctctgcgtgctggccagctggctcaccgccttcgtcctcaccaagtccttcctgccagggggggtgagtgttcagccccaggccccaggcccctaggccctctctgactggccaggacccttctcagtgccaggggctgtgccaaggcctgctgtcaggaccctaactctcagtgaccctaggagatgagcacacaccccctgaactcagagaccccagagtggtcacgtgatagcctagcaaacgctcttcattataagaaacaggaacgggcgtatgcaactgctctggtaagtcaggttag

SEQ ID NO: 499 - DNA, 572 bp, Homo sapiens
tttttgggctccgggacccccgggagtgggagcggcagtcggggacgcctcaactcgttcactcagggaatcctgcccatcgccttctccaggccgacttcgcagaactactgctccctggagcagccaggccagggcggcagcaccagcgccttcgagcagctgcagaggtcccgacggcgcctcatctcccagagatcttccttggagaccctggaagatattgaggagaacgcccctctccggagatgtcgaactctctcaggttcacccagaccaaagaattttaagaagattcattttatcaagaacatgcggcaacacgataccaggaatggcagaatagtccttatcagtggcagaagatccttctgtagtatattttcagtgctgccgtatcgcgacagtacccaagtcgggtatgtatatgcatgcatgctttgtagttctctgggtgaaaagatctcacaccaatgtacataatgtggccatcctttccattttcaagaagttgccttgctttgatactgcaaattcagtatttgtacactggaatgataaaaagatgttcc

SEQ ID NO: 500 - DNA, 1642 bp, Homo sapiens
atgagacgctttttaagcaaagtctacagtttcccaatgagaaaattaatcctctttcttgtctttccagttgtgagacaaactcccacacagcactttaaaaatcagttcccagctctgcactgggaacatgaactaggcctggccttcaccaagaaccgaatgaactataccaacaaattcctgctgatcccagagtcgggagactacttcatttactcccaggtcacattccgtgggatgacctctgagtgcagtgaaatcagacaagcaggccgaccaaacaagccagactccatcactgtggtcatcaccaaggtaacagacagctaccctgagccaacccagctcctcatggggaccaagtctgtgtgcgaagtaggtagcaactggttccagcccatctacctcggagccatgttctccttgcaagaaggggacaagctaatggtgaacgtcagtgacatctctttggtggattacacaaaagaagataaaaccttctttggagccttcttactataggaggagagcaaatatcattatatgaaagtcctctgccaccgagttcctaattttctttgttcaaatgtaattataaccaggggttttcttggggccgggagtagggggcattccacagggacaacggtttagctatgaaatttggggccaaaatttcacacttcatgtgccttactgatgagagtactaactggaaaaaggctgaagagagcaaatatattattaagatgggttggaggattggcgagtttctaaatattaagacactgatcactaaatgaatggatgatctactcgggtcaggattgaaagagaaatatttcaacacctcctgctatacaatggtcaccagtggtccagttattgttcaatttgatcataaatttgcttcaattcaggagctttgaaggaagtccaaggaaagctctagaaaacagtataaactttcagaggcaaaatccttcaccaatttttccacatactttcatgccttgcctaaaaaaaatgaaaagagagttggtatgtctcatgaatgttcacacagaaggagttggttttcatgtcatctacagcatatgagaaaagctacctttcttttgattatgtacacagatatctaaataaggaagtatgagtttcacatgtatatcaaaaatacaacagttgcttgtattcagtagagttttcttgcccacctattttgtgctgggttctaccttaacccagaagacactatgaaaaacaagacagactccactcaaaatttatatgaacaccactagatacttcctgatcaaacatcagtcaacatactctaaagaataactccaagtcttggccaggcgcagtggctcacacctgtaatcccaacactttgggaggccaaggtgggtggatcatctaaggccgggagttcaagaccagcctgaccaacgtggagaaaccccatctctactaaaaatacaaaattagccgggcgtggtagcgcatggctgtaatcctggctactcaggaggccgaggcagaagaattgcttgaactggggaggcagaggttgcggtgagcccagatcgcgccattgcactccagcctgggtaacaagagcaaaactctgtcc

SEQ ID NO: 501 - DNA, 2629 bp, Homo sapiens
tttcgtctgggacgaggtggcccagcgctcagggtgcgaggagcggtggctagtgatcgaccgtaaggtgtacaacatcagcgagttcacccgccggcatccagggggctcccgggtcatcagccactacgccgggcaggatgccacggatccctttgtggccttccacatcaacaagggccttgtgaagaagtatatgaactctctcctgattggagaactgtctccagagcagcccagctttgagcccaccaagaataaagagctgacagatgagttccgggagctgcgggccacagtggagcggatggggctcatgaaggccaaccatgtcttcttcctgctgtacctgctgcacatcttgctgctggatggtgcagcctggctcaccctttgggtctttgggacgtcctttttgcccttcctcctctgtgcggtgctgctcagtgcagttcaggcccaggctggctggctgcagcatgactttgggcacctgtcggtcttcagcacctcaaagtggaaccatctgctacatcattttgtgattggccacctgaagggggcccccgccagttggtggaaccacatgcacttccagcaccatgccaagcccaactgcttccgcaaagacccagacatcaacatgcatcccttcttctttgccttggggaagatcctctctgtggagcttgggaaacagaagaaaaaatatatgccgtacaaccaccagcacaaatacttcttcctaattgggcccccagccttgctgcctctctacttccagtggtatattttctattttgttatccagcgaaagaagtgggtggacttggcctggatgattaccttctacgtccgcttcttcctcacttatgtgccactattggggctgaaagccttcctgggccttttcttcatagtcaggttcctggaaagcaactggtttgtgtgggtgacacagatgaaccatattcccatgcacattgatcatgaccggaacatggactgggtttccacccagctccaggccacatgcaatgtccacaagtctgccttcaatgactggttcagtggacacctcaacttccagattgagcaccatctttttcccacgatgcctcgacacaattaccacaaagtggctcccctggtgcagtccttgtgtgccaagcatggcatagagtaccagtccaagcccctgctgtcagccttcgccgacatcatccactcactaaaggagtcagggcagctctggctagatgcctatcttcaccaataacaacagccaccctgcccagtctggaagaagaggaggaagactctggagccaaagcagaggggagcttgagggacaatgccactatagtttaatactcagagggggttgggtttggggacataaagcctctgactcaaactcctcccttttatcttctagccacagttctaagacccaaagtggggggtggacacagaagtccctatgagggaaggagctgttggggcaggggtgtaaattatttcctttttctagtttggcacatgcaggtagttggtgaacagagagaaccaggagggtaacagaagaggagggacctactgaacccagagtcaggaagagatttaacactaaaattccactcatgccgggcgtggtggcacgcgcctgtaatcccagctacccaggaggctgaggcaggagaatcgcttgaaccggggaggtggaggttgcagtgagctgagatcacgccattgtactccagcctgggcgacaaagcaagactccatctcaaaaaataaataaataaaaaaataaaataaaatggtctggatttggtcaacaccttattcagtaaatccttaatttaccttgagacatacaaagacattcttttaaagagctattttcttggtattgcacaaaggttaattttaaagcaatccaggcaagtaagctcacaaaaagaagtacattcatctaatccatttagcaaatgttgcaaatcagcttccaccaataaaacgtagaaatctgtgaaactctatccttcgtgtcagttttaacattgtgttgatggcagccatttcaggcagaggtagccaagttccatatatatggggaaggcaaaaagcagaaaaacattgcaggagacttagcagttctctggcttctaatgactatagagcaatttcgaatatgagccatgtttctatgcagaattcttcttttatgccttaaacacaaaagagcttgttgctgccttgggcagatatactggaattgtcctctttgagcttactttctcttttctctaaggtcaagtaaaaaatgtgagacgttttcatataccacaaaggtaatacagcaggctggagtcactctaatcaaattaggagcaattcccttgtaaaatccaccgacgccttctttcctccatgtctttgtgattacatctattacaccactgtaaaacatgtgttgatcctgaagacgagctcttacgacttgatatgggtatgttgctgcgacagcaaatattttggatagtgctgcaacagatatatattctactgtgctcaactgggcttctggtaatctattgatatgctggttgtacttcaacttcag

SEQ ID NO: 502 - DNA, 997 bp, Homo sapiens
cgttctctcctgcagggaaagctcacaactcctcacagcgatctggtatcttgagcgtcagtttctggccgaaactgggggctcctgactgaactccctcccacctagaaaaccttctgtgcagtctgattgctccaacacccacagagcaggattcaggtatcccggagaccttgggaggtccccatccagaggtctgctgtcctgccaggcttggggcagcagggactgggaccccactcagacctctctggggcaaatgttttggttctcacaacagccctagtgaaatcaatcctagatactcccatttggtcccaccaaggccatttaatttctctgtaaagggtaagatgacacaaaagagccaactatggaaacggtgaggtgggagtctgaaccgatttagctgttctcagggcgcacagggtgttgacggtggttttcatctgccacctgcctccttgagacccagctggcctgagtgtgcacgaaatgggaccttctccttgggtccaccaggctgggaggcacccctaggtacccggctcctcatcacagcggcagccctctcggttccacatctggttctcctgacgaagccgctggttttcggtccggagcctctggacctcggcagccagctcctccacctggcggcaggactgctggccggtgcacgcctgcagctgctgcagcctcctagtctcctcctccgcctgcgacagccgcttctccagctccaggtagtctcgcaccagctcctgcttgctgcggccctgcaggctctcggtgtggaagcgttcgtaagtctcagagaagtccttccgctggaactcaccgtgcgctcggccccgcccatcactgtccccggcctcactctccccactggaacctgggtgggagatcccatggggcacatccaagttgggctcctccgggtccctgtcattcatcaggaactgggtggtgttgtagggaattccaccacactgga

SEQ ID NO: 503 - DNA, 1586 bp, Homo sapiens
aaatgcacatctcatggcagctaagccacatggctgggatttaaagcctttagagccagcccatggctttagctacctcactatgctgcttcacaaaccttgctcctgtgtaaaactatattctcagtgtagggcagagaggtctaacaccaacataaggtactagcagtgtttcccgtattgacaggaatacttaactcaataattcttttcttttccatttagtaacagttgtgatgactatgtttctattctaagtaattcctgtattctacagcagatactttgtcagcaatactaagggaagaaacaaagttgaaccgtttctttaataatgctgatctactttttgttgaatttgtattttatttcaagtgtcaaagaaatcatctttgtttatttagatgaaaccaaacactacacatttacactcacactgcttccaggacccaagggtttcacagaccatttgcctacctggttctttcctctcctctttccagtgatttctagaataccctttcaaaggaccacatgaatatacgaactgtaaaattcaactttgatcttttgcgaaatgttttatttactgcttaaaatctaggtgggtggatatattcatgtatgcatatattgatagattaatacaaacataagtatgtatttaaattgaaggataagtaaagtgagagtacaacagccccattcttagttaaaaagaaaagaaaaagacaagagcaagccactgccaccacaggtaccagcacttaaatttgtcagcaggctgaccaaagagtggcctgtctgttggcattcatcggacatggcagctcccttcagctctccagtgagtttcaagttcagagcactttcagtccttgtcttgtttatctattactgaagggtttctaggaaggtttagcagtgcttcaattttcttagcatcattctcaggttcatcttcctgtaaactactttcaattttctcagggaggtgctcagtaacttgtagtctgcctttccactcttccagttttagctcatggagtgcctttcgatccttctgttttctttcctgaacagtctcaccagagtacttctgaaatgccatcagcaggcctcctacaggagtgcccagcaaggctccaattatgccaccagccaccaggccacgcaggcctacgtttatcctaaaaagacttcccgtgacagtctttgccaaacagctcccggaggcggtcccatccagattccgggtaatagggctctgggacgtagggaagccgcttctgacgctcctcaaggacttccgaatcggcagtcacagcttcggcagcaaagactcggggaaataggcacaatgctctacagagaaagctccgcggtgccggtggcggcacctccatggccttctctcgacctacggacaaacttgagcgctcaggacttcaagtcctcgcggacgtgccgcgggagagcgtaactgtacgaggtgagaatccgtgcatttgacccaggttaaccctctgccagagggctcgacacccacaccttcagtccccggcctcgctttgcggacgcgtggg

SEQ ID NO: 504 - DNA, 1442 bp, Homo sapiens
cggggggcgtggggctgggcccagccggacgcgacctcagcctgcggcggctaactgccggtaggcgtctgtgtgcgccgccaagtcggtggggcggggacgcgaggtgtggatggggggtcgccttgacctctgcctcagccagtagcgcagtctcggcctcgccgttacggagatggtgccctgggtgcggacgatggggcagaagctgaagcagcggctgcgactggacgtgggacgcgagatctgccgccagtacccgctgttctgcttcctgctgctctgtctcagcgccgcctccctgcttcttaacaggtatattcatattttaatgatcttctggtcatttgttgctggagttgtcacattctactgctcactaggacctgattctctcttaccaaatatattcttcacaataaaatacaaacccaagcagttaggacttcaggaattatttcctcaaggtcatagctgtgctgtttgtggtaaagtgaaatgtaaacgacataggccttctttgctacttgaaaactaccagccatggctagacctgaaaatttcttccaaggttgatgcatctctctcagaggttcttgaattagtgttggaaaactttgtttatccgtggtacagggatgtgacagatgatgaatcctttgttgatgaactgagaataacattacgtttttttgcatctgtcttaataagaaggattcacaaggtggatattccatctattataaccaagaaactattaaaagcagcaatgaagcatatagaagtgatagttaaagccagacagaaagtaaaaaatacagagtttttacagcaagctgctttagaagaatatggtccagagcttcatgttgctttgagaagtcgaagagatgaattgcactatttaaggaaacttactgaactgctttttccttatattttgcctcctaaagcaacagactgcagatctctgaccttacttataagagagattctgtctggctctgtgttccttccttctttggatttcctagctgatccagatactgtgaatcatttgcttatcatcttcatagatgacagtccacctgaaaaagcaactgaaccggcttctcctttggttccattcttgcagaaatttgcagaacctagaaataaaaagccatctgtgctgaagttagaattgaagcaaatcagagagcaacaagatcttttatttcgttttatgaactttctgaaacaagaaggcgcagtgcacgtgttgcacgttttgtttgactgtggaggaatttaatgatagaattttacgaccagaattatcaaatggatgaaatgctgtctcttcatgaagaattgcagaagatttataaaacatactgtttggatgaaagtattgaccaaattagatttgatcccttcattggtagaagagattccaagaa

SEQ ID NO: 505 - DNA, 1284 bp, Homo sapiens
ccagagcctggctgaggtcctgcagcagctgggggcctcctctgagctccaggcagtactcagctacatcttccccacttacggtgtcacccccaaccacagtgccttttccatgcacgccctgctggtcaaccactacatgaaaggaggcttttatccccgaggggttaccagtgaaattgccttccacaccatccctgtgattcagcgggctgggggcgctgtcctcacaaaggccactgtgcagagtgtgttgctggactcagctgggaaagcctgtggtgtcagtgtgaagaaggggcatgagctggtgaacatctattgccccatcgtggtctccaacgcaggactgttcaacacctatgaacacctactgccggggaacgcccgctgcctgccaggtgtgaagcagcaactggggacggtgcggcccggcttaggcatgacctctgttttcatctgcctgcgaggcaccaaggaagacctgcatctgccgtccaccaactactatgtttactatgacacggacatggaccaggcgatggagcgctacgtctccatgcccagggaagaggctgcggaacacatccctcttctcttcttcgctttcccatcagccaaagatccgacctgggaggaccgattcccaggccggtccaccatgatcatgctcatacccactgcctacgagtggtttgaggagtggcaggcggagctgaaagggaaagcggggcagtgactatgagaccttcaaaaactcctttgtggaagcctctatgtcagtggtcctgaaactgttcccacagctggaggggaaggtggagagtgtgactgcaggatccccactcaccaaccagttctatctgggctgctccccgaggtgcctgctacggggctgaccatgacctgggccgcctgcacccttgtgtgatggcctccttgagggcccagagccccatccccaacctctatctgacaggccaggatatcttcacctgtggactggtcggggccctgcaaggtgccctgctgtgcagcagcaccatcctgaagcggaacttgtactcagaccttaagaatcttgattctaggatccgggcacagaagaaaaagaattagttccatcagggaggagtcagaggaatttgcccaatggctggggcatctcccttgacttacccataatgtctttctgcattagttccttgcacgtataaagcactctaatttggatctgatgcctgaagagaggcctagttaaatcacaattccgaatctggggcc

SEQ ID NO: 506 - DNA, 1757 bp, Homo sapiens
ttttttttttttcagagcttaaaaaccaaaaggcagaaaatagactttattccaagacagatttgtaaaagatgtttttaaagggaaaggcaagtcacgctactaaatcaaacattgttcacaatttctggatcttcctcctccgcctggcactgcagctgagccttggcggatatgctcggggccctcggcgcagaggaacttagcctcgattctcttcctgaggggcttcttaacttttccaagccaggcagtgagcgtggtgggaggctggggctggtgcctgcggacagctccagatggaatcccaggccacggtgcttctagtgtccccccagcgagcttgcggtgtggcaggcggccaggaagggccatgagcagggtggcctgaatgaaaaccgagggccgaagccagcctgactccctcgcctaagctggggctcggtccgaggcacacgcatggccttggccagacacaaaccaagagactgccatgacagacagagcagaaacctcccgagcactgtgttcaagctaagctttcctaagacgggcttctcaggcgagacgtgacaccagacaccgtcgcatgttacttggagagaacagagacgtgcgggccacagcggcccaccaaaggctgccatccaagctgagttccgcaggcctcacctgcagctggagagggaccttgccctgatcctcctggtaggtacccgctaagggattcaggacagagcgtcacactgcacgcagggtcctccgccaccaccatccaagaaccccggggggctggccacgcgctggcctctgccaaggagtgccagtggttcccgggacggggccgcccaagcaggtgagggaggtttagatgaatgacttggccagggtcaccatgtggtccacgccacatgccacgtccacaggctccccaggcatcgtcaccctccatgggaaatactggtcctccaggcgaccgattcccaggcaccctcggatgttcttgccccatacaaacagctctcctttgttggtcagtgcagcaaagtggctgagtccacatcggatgcgggaaacctggatttctgggttgaactccgtcaagccaaagagagtgggtggaatcatttcagggacggcactttccactaggtttggacctttcccaagaattccatagccccagacaaaaacatgtccttctccgtttaacactgcacagcccgtgccaccgcatgcagcctgtcgcaccttccccactcctgagaagtgtaagcagcggggcacattcacctgtgtggagtcagtgacagaggccagctgcaggtactccgagtttccccaaccaaaaagtcctccgtcggcggacacggccaggcagcaatcaccgtaggtggcaacttggataacgttcactcccgccaggtctccacccagcttggtgggcgagctggtgatattgtagtgacccagacctgtttgcccatcagcaccccatccacaagaatagacttctcctttatccgtcaggaacagactatgatcctgaccacaggcgacctggaccacctggccatcgaagtcctgcatcctgtggactctgtgactttcactgtaaatttcattttcgaccacctttcttccacattgcccataagaattgtttcccatgctgaagactccttccctgtcagtcaacacaagagagtgagctcggccgcaggagacttgcagcacccgtgtctcctgaggtctgt

SEQ ID NO: 507 - DNA, 618 bp, Homo sapiens
gaattcttgaaggaaaaggagaaattagaaatggagttagcagcagtgcggactgcaagtgaggaccatcggagacacatcgagatcctggaccaggctttgagcaacgcccaggccagggtcatcaagctggaagaggagttacgagagaagcaagcatatgttgagaaagttgagaagctgcagcaggccctgacccagctgcagtctgcatgtgagaagcgagaacagatggagcggagactgcggacttggctggagagagagctggatgcactgagaacccagcagaaacatggaaatggccagccagccaacatgccggaatacaatgccccagccctcctggaacttgtgcgggagaaggaggagcggatcctggccctggaggccgacatgacaaagtgggagcagaagtacctggaggagagcaccatccgacactttgccatgaatgccgcagccactgcagcagctgagagggacaccacgatcatcaaccactcacggaatggcagctacggagagagctcgctggaggcccacatctggcaagaggaggaggaggtggtgcaggccaacagaaggtgtcaggacatggaatacactattaaaaat

SEQ ID NO: 508 - DNA, 2214 bp, Homo sapiens
atgcaggcggtccgcgccactgcctctcagtccctgtcctgcgcccgcgcgccccgggagcctacccagcacgcgctccgcgcccactggttccctccagccgccgccgtccagccgagtccccactccggagtcgccgctgccgcggggacatggtcctctgcgttcaggggtgagcacccccttgtaagctcagggctactgttgggtgtcagggaacaaagttttagactgctgcgctccaaagcgggcacacacatgtacctagaacacaccagccactgtccccaccatgatgatgacacagccatggacacacccctgcccagacctcgccctttgctggctgtggagcggactgggcagcggcccctgtgggccccgtccctggaactgcccaagccagacatgcagcccttgcctgctggggccttcctcgaggaggtggcagagggtaccccagcccagacagagagtgagccaaaggtgctggacccagaggaggatctgctgtgcatagccaagaccttctcctaccttcgggaatctggctggtattggggttccattacggccagcgaggcccgacaacacctgcagaagatgccagaaggcacgttcttagtacgtgacagcacgcaccccagctacctgttcacgctgtcagtgaaaaccactcgtggccccaccaatgtacgcattgagtatgctgactccagcttccgtctggactccaactgcttgtccaggccacgcatcctggcctttccggatgtggtcagccttgtgcagcactatgtggcctcctgcactgctgatacccgaagcgacagccccgatcctgctcccaccccggccctgcctatgcctaaggaggatgcgcctagtgacccagcactgcctgctcctccaccagccactgctgtacacctaaaactggtgcagccctttgtacgcagaagcagtgcccgcagcctgcaacacctgtgccgccttgtcatcaaccgtctggtggccgacgtggactgcctgccactgccccggcgcatggccgactacctccgacagtaccccttccagctctgactgtacggggcaatctgcccaccctcacccagtcgcaccctggaggggacatcagccccagctggacttgggcccccactgtccctcctccaggcatcctggtgcctgcatacctctggcagctggcccaggaagagccagcaagagcaaggcatgggagaggggaggtgtcacacaacttggaggtaaatgcccccaggccgcatgtggcttcattatactgagccatgtgtcagaggatggggagacaggcaggaccttgtctcacctgtgggctgggcccagacctccactcgcttgcctgccctggccacctgaactgtatgggcactctcagccctggtttttcaatccccagggtcgggtaggacccctactggcagccagcctctgtttctgggaggatgacatgcagaggaactgagatcgacagtgactagtgaccccttgttgaggggtaagccaggctaggggactgcacaattatacactatttatttatttattctccttggggttggtgtcaggggcgagccaaccccacctctatgccctgagccctggtagtccagagaccccaactctgccctggcttctctggttcttccctgtggaaagcccatcctgagacatcttgctggaaccaaggcaatcctggatgtcctggtactgacccacccgtctgtgaatgtgtccactctcttctgcccccagccatatttggggaggatggacaactacaataggtaagaaaatgcagccggagcctcagtccccagcagagcctgtgtctcaccccctcacaggacagagctgtatctgcatagagctggtctcactgtggccgcaggccccggggggagtgcctgtgctgtcaggaagagggggtgctggtttgagggccgccactgcagttctgctaggtctgcttcctgcccaggaaggtgcctgcacatgagaggagagaaatacacgtctgataagacttcatgaaataataattatagcaaagaacagtttggtggtcttttctcttccactgatttttctgtaatgacattatacctttattacctctttattttattacctctataataaaatgatacctttcatgtaaaaaaaaaa

SEQ ID NO: 509 - DNA, 2355 bp, Homo sapiens
tttcgttgatatcttccagagatggaaagagtgcaggggaaagagccctgcccaggcggaactctcctatctgaataaagcgaagtggctggaaatgtatggggtagacatgcacgttgtcaggggaagagatggctgtgaatattctcttggactgaccccgacaggcatattaatctttgaaggagctaacaaaataggcttattcttttggcctaaaattaccaaaatggattttaaaaagagcaaattgacactcgtggtggtcgaggatgatgatcagggacgtgagcaagagcacacgtttgtgttccggttagacagtgccaggacctgcaaacacctttggaagtgtgcagttgagcaccacgcattcttccgactgcggacgccaggaaacagcaaatccaatagatccgactttatcaggctgggctctcgcttcagattcagtgggcggacagaatatcaagctacacatggctccaggttacgaagaaccagcacctttgagaggaagcctagtaaacgttatccatcccggagacattcaacgttcaaagcaagcaacccagtgatagcagcccagctctgctctaaaacaaatccagaagtccataattaccagcctcaatatcatcctaatatccatcccagccagccccggtggcatcctcactctccaaatgtcaggccatcctttcaggatgacaggtcgcattggaaagcatcggccagtggagatgacagccattttgattatgtccacgaccagaaccagaagaacttaggagggatgcaaagtatgatgtatcgagataaactcatgactgcactttgagagactgaagcatctctcttccattcaccttcatagtttcattgcattccatgaaaagtgtcttggcctcagatggatggatgtgtttggacgagtgtctttaaggagtagtcctgaaaggtgtttttggtgtccatgtaaatatttgaagataaaaccactatagcttgtcataatttactgttgactgcattctcattaaaatgaaggtaaaggctcaggaatcatattgatgttctgattttaaaattggagtcaaagtctatgtttatcattttactatgttcctgatgttctttgttatttaattaatgggagcaaataaaaccagaagagcttgggaagattgctcagcatatattcctgtcgtagaagttgagattgctagggtccagtttccctagtgtggcctggacgagtcatttccccttcattgacctcattttccccatctgaaaagagagggttggactaagtgatctccaaggtcctttccaactctaaaattctgcaatttgttaacatttcattttgtttaggttgaggacatacattcaaactaattttatcacaaggaaaactgcaatacccacttccttgacagagttactcctttcagaagctaaataaagtatataacttattagatgttatatagatacagggggactttgaatttcacatcttaaagcagttgagctactttgaatttaagcagtcgtactaatcttaaattgcatagcatttgttttgatcgaatttgctgctcaagtatgggaataatttttaatgtcttaatgattggtgctgctaacttgcgtgatttcagaagacataattgtgaatacacactgtcagaattgggggattggtttttaccctagacttcactcttaaaaagcaacgtgcaatcaagatcatttatggctcaaatgaaagcatataaggttttcttgaagttgtgccaaagcattctgtagagtaggatgagatggttgttgccctagtctgttggtagaaccagaaatcaatatgttgtcttttaggttaaagcttgtaccaaaatatttatttcccccatttcaagccctgagtcaaacatttttttctcttaataatagacctgaaatgttttattagtatttctgtgaaatcagttgattcttgtgccatttttgtatatgtaattgtaattttgcccatgttaggccctctaaaaaatgtttgacatcctttgagatattttattactaaaatctgatcttttttggctactgcaaaaatctattcagcaagaaggtatcagctgcataccttgcacagtggagctgactacctataaactctccctaaggcatttgtttacaggtgtattccattttagcagacgttctgatgctcagtgtatgtgctgcatacaaataaatgtgttctgaatcttttcatcttattgatagcattttaacaaatgtgtttccaaggaataaagattattcttgcttttaaaaaaaaaa

SEQ ID NO: 510 - DNA, 775 bp, Homo sapiens
tggtggaattcgattaatacagaaactgacatggcgatcaagacaacaggatcgagaaaactgtgctatgaaaggcaagcataaagatgaatgccacaactttatcaaagtatttgttccaagaaacgatgagatggtttttgtttgtggtaccaatgcattcaatcccatgtgtagatactacagggtaagtatattttatgtgatatgcttcttttgatcaacttttctcccttcactgatatgctgttagagttgaaatctttctgctttccagtaatttgttttatctctagtgcaatgaaagaataaagacagaattcttcaaatggaattttaatacaaataaaatagtattgccttcaaacgggcacgttgaatagatatgacactggctatttacttttcttttgtagttgagtaccttataatatgatggggaagaaattagtggcctggcaagatgcccatttgatgccagacaaaccaatggtgccctctttgctgatgggaagctgtattctgccacagtggctgacttcttggccagcgatgccgttatttatcgaagcatgggtgatggatctgcccttcgcacaataaaatatgattccaaatggataaaagagcccactttctttatgccataaaaatggaactatgtctatttttcttttcgagaaatcgtggcaacataataattaggcaggctgtggattcccggtggcccgatatgaaaaacaactggttggtcccacggtctgagaacattgat

SEQ ID NO: 511 - DNA, 1553 bp, Homo sapiens
ttttttttttttaagtttgaagccttgcccaagctttaatgtcatgctaaccagttaccttgttagagctgggaagccaccttttgctcaaaatgcagacttctgcctttgaaaacacaccacacctgattttaagtgcttaaaggacagaaaatgtcgttgctttaaattgttgctttgttcagagacatctggatttgctgtatccatacaagcaaaagcttttccaattccagaatcaacccacactaatttgttattgcctcgtactgtattggcccagctgtaatcaactcagcaggcttttggttgtaaattcaagtggaaattgagttggtcttatttgtgcccgttgatatctgagggctgtgaggaagatggccagtaggtcaaagggaatagtgttgaaaagctgaccagtactgggcaggtggccggctgtccctcaggcaccacaacgccgagccacggtaaggggcatgagccacatttgcagaatatagccagagtccttccagaacctcctgattcgcgccaggaggcatcccagggcacacaagtgtcaagggcctactcaggtgcttggcagagctctctgtgtgttattaacagaagaggctacggcttagagtggaaaggagcatgtgatggctagcggtgggcagcctgtgtactctgccaagtttgggtggtccaggtccccacgatttctgtgtggagggttgtccggcatctggccactaggggggccggtggttctcacacacacgcagcggggctccttagcacctggcttatacagcttcctggggacgccaatccagtctctgctcacacctccactcttctgggagcaccagagccggctgcccctggctgagctccactccgcgttgcacggcgggaatgtctgcttctcttgcagctgtagtttgttggcctccaagcctctggtgatcgcagcttctacctgggtcagtgccggggtgggcagcccatcctctccgtagaaccgtcctgtcaccctcccaacacacacataattcttctcatagaatgaaagccaattgtgaagtgtcagcatctcagcggctgacaggtcggatacgtcatccacgaggcctgcttcagaacagtccccggtcacgaaagctctggatgcgtctcggcctgcgaagccgctatagtgggacccaggctcgtagtgcctccggccggaggacacatcgtagacacggccgagcaacgccaagtacaggcccgggtcccctgggccgccgcggtagcgagacagctcctccggtatgaaaaggcgaaagccagcgcggggaccccaccagcccataagccgtgctgccattaccgctgctgcggctacagccaggcccaacaaaagcccacggcctccgcacctcaacatctatataggcccacccgctccgcacttccgaggttgccgcctctatctacagctaagatggccgagacgccgagcgtgacgtcatcggcgcgcgcgctctcgctctctctctcgcgcgctagtgctcgcgctc

SEQ ID NO: 512 - DNA, 1260 bp, Homo sapiens
tccttctctggccttgcccttgccctgttccctttctggtcctgccatgtttctggccctgccctgtccatgtcctggacctgactctggccctggacctccctgtccctgccctgccataccttggcccgttccttgctctacactgaccctgccctgccttggccctgtgctaccctagccctgccctggccttctgctgaccctgatcctgccatggccctggccctgccatgtccctgccctggccctggttctgccctgcttctggccctggccttggtcctctcatgtccctggctgtgaccctgcccctggtttttctctggccatgaccctgccccggttctgtcctatccctggccctgtctcagttctgtcctagccctggcctttcacagtactttatgcttagtaagggctccatggtgtctgtgagttgaatgttgtattcatagtatctgccaaaacagaaagaaaaaaaacaaaatattttgataagaagttaaagctttgtatataatatgccttgaattgtaagtgcctgttattagttgtattacatataggtcatggttttgtacacataactccaaaccattgatactgttaaaagaatatatgaatatatgaaagaatgtataaacgtaagaatgtatcagtatctaatgacctttccaaattaatttttatttttagctctgttagatttttctcagtgtaacaaatgtttattcctatgtaattaagggcgtatttcctgtacagaatattcatattacctaattgaaaattatatgatacaaaaatataatactatttttagccaggcatggtggctcatacctgtaatcccaacattttgagaggccacgtttggagaatcatttgagtccaggagttgaccagcctgggcaacatagtgagaccttgtccttattaaataaataaataaataaataggttgggcactgtggctcatatctgtcatcccagcattttgggttgcccaatgcaggaggattgcttgagccccaggagtttgagaccagcctgggcagaatagcaagactccatctctacaaataataaaatattaaccaggtgtggtggtgtgcacctggggtaccagccacctgggaggctaaggtgggaggtttgctcgaggctgcagtgaactgtgaatgcaccactgcattccagcctaggccatagaacaggatcttgtctataaataaagaaataagtaaaaatataaat

SEQ ID NO: 513 - DNA, 1596 bp, Homo sapiens
ctccggcggcgcgtcccccgagcttggtacggctcagcccgtctcccccgaagccgcgcgcccgcgcccgcgcccctcagtcggtggagcccgcagccccccttgtggcccgcggcagctccccgcccgctcggcccgcgcccgccatggtccgtccgcgccgtgccccgtaccgctccggcgccgggggccccctcgggggtcgcgggcgccctccgcggcccctcgtggtgcgcgccgtccgctcgcgctcctggcctgccagcccccgaggcccgcagcctccgcgggatccgggcccgctcggcccctcccatggaaggtgctcgggtcttcggggcactgggtcccatcggtccctcctcacctgggctcaccctcgggggtctggccgtgagcgagcaccggctcagcaacaagctgctggcttggagcggcgtcctcgagtggcaggagaagcgcagaccctactctgactccactgcaaagctgaagcggaccctgccctgccaagcctacgtgaaccaaggcgagaacctggagaccgaccagtggccgcagaagctgatcatgcagctgatccctcagcagctgctgaccaccctgggccccctgttccggaactcccagttggcacagttccacttcaccaacagagactgcgactcgctcaaggggctctgccgcatcatgggcaacggcttcgcgggctgcatgctgttcccccacatctccccctgtgaggtgcgcgtgctcatgctcctgtactcgtccaagaagaagatcttcatgggcctcatcccctacgaccagagcggcttcgtcagtgccatccggcaggtcatcaccacccgcaagcaggcagtgggacctggtggtgtcaactcaggcccagtccagatcgtcaacaacaagtttctggcatggagtggtgtcatggagtggcaggagcccaggcctgagcccaacagtcggtccaagaggtggctgccatcccacgtctacgtgaaccagggggagatcctgaggaccgagcagtggccaaggaagctgtacatgcagctcatcccgcagcagctgctgaccaccctagtgccgctgttccggaactcgcgcctggtccagttccacttcaccaaggacctggagacactgaagagcctgtgccggatcatggacaatggcttcgccggctgcgtgcacttttcctacaaagcatcgtgtgagatccgcgtgcttatgctcctgtactcttcagagaagaaaatcttcattggcctcatcccccatgaccagggcaactttgtcaacggcatccggcgtgtcattgccaaccagcagcaggtcctgcagcggaacctggagcaggagcaacagcaacgagggatgggggggtagtggttaccccgggctgggcccctccaggagtcacagatgaggcccccgcagagactggtgacacgcttctgagcaggggcccctggggacttcaactgcccagcaacatggaggatggtgtcctgaggcctccaaggacggtccccacccctctacgtttccccaataaagccttttaaaaacctgccaaaaaaaaaa

SEQ ID NO: 514 - DNA, 963 bp, Homo sapiens
ttttttttttttgccgctgtcaacagacagtttattctatatacaaacacaattttgtacactgcaattaaatagaatggaatgagcgctcctccgcattcctccccgagtgactggtttggccgccggcccactccatccccgagtgggactggaccacggccctggctgctgccactgatgttggcgcctgcaccccacgtccctatgcccgaggcgcaagctctgctctcccggggaccccaggcctggcgcacacgcggggagggcggggccatggagaaggcactgcagggagcaccaggcagagccgggctgaggccggccggcactagggcgcgaggccccaccccaagccggcctctcctccacacctccgccttgctcagagacctgcaccatgggaccccactccatcctcaggacggttcactgcagacctaccaagacccctccagaaccttccgcggaaccccaccccctctccttgctgaccagctcaaacacctcactagcgggtacaagcctcgggcgcgacctcacaccagggggaggaaagccgccttccgggcaaaccccacgaaaccctgaaagcccccgacacaggctgggcagtcccagaggaaggaggtggctggcctcccccacccccacgggctcgggaaggtcaggcccagccagcaggggtcagaggcggctcagctgtgcggctcaggaccccacctccgagggcgcctccgttggggccatggaggccgggctaggcccgcctaccgcagcccccaggggagttgtgtcagaagctgcggagtcactcggggggacactgtcctggggggcgtgggggaggcccccagcagggcccagcgggctggctggacgccgctccaggagggaggcgctcaggccggacaggaaggaggcgtctgtgatgatggcagcggtctctgccatccaacccag

SEQ ID NO: 515 - DNA, 777 bp, Homo sapiens
  misc_feature (1)...(777): n = a,t,c or g
ttttttttttttaagggagaacagttttattagcatcacagggtccatttttccctttccatccaagcatccagagtctggtgtcctttaatcagttggcaggttcaacctggaggccactggagctgccggcccccaagtacatgaatgtgcagatgatacacagattgtgcacccagcttcccatcgttgatcacaagtcggtatccatctcccaggccctcagcctttgctgtctgcttggccacaaggagtaggtgtcctagaagctatagagagagcggagggacataggtggctgctggtcttcttcttcagcctggctaatccgaggaatgggcttcttaggaatgaccaggaagtgcacaggagcctgaggggccacatcacggaacacaagacactgctggtcctcatagagaatgtcagctgggaggctcttgtccaggatccgggagaagatggttggggctgctcccccaggagttgcctgctgggccttggccacttcattcccatcagtcacacctgcagctcctcggacctgccccccgcgcacccccgtggccgccacggctctgcgcgccgcgcgcaacccagcagccagcaccacggctgccgccatcttccctgagccgcgggaacctctcacccgggtcagcactcggctccgcggccaaccgtgggtggggactccgggcncggcgaacgcgtgggcgnacgcntnctcacccanngtnnaacnnntnctaaatttcccnnnaaagaaagcagcct

SEQ ID NO: 516 - DNA, 3206 bp, Homo sapiens
ttttttttcctaggcaactgttggcccaaaaaaaaaatttattttcctttcaaataaaatgtacaaccaaaatttagggtttggagcagtagggaagacaggagataccagggagcccattttacagtagagatctgcatctgacccctctatcccatacctttgcaaaggaagggaggggtctacaagccagaactttcagaagagaagaaaatacatgctgtgctggtgctgtttctggagcaggtcatcctttaggtatagaacaccacctccacccgatgacatcagaaccactgactggtagagcccttggaaatcatacagtccacccatcccccgccagacacatggacacaccgaggctcagatggggaagggtacataccctagggcacacaccaaatcaaaaaggtgaagtcaggactagaacacctgagcaactttagcaggggactgtggccacaggcctggatgtgcacagtagatcatgaaatacattagtcctagtgaatgacccccgtgcagagaaatggcttgtggttgtcagggagcagccacttgcctcaggggctccctgaccctcagtgaaaggtgactgtgtaaaggccaaaaactggatggtggtcatgaacctcaggacgttttttttttttagcaccaaatggtggagctctctgccagctcagcttcttggggcctctcaggtaaaggtgatgtttgaggaccccacgcccatatgaggggtggagagaagccagcagcactggggtgagccttggcctacacccttccttcttacccttcccccatcttcagtaaggccaagagaggatgtggggtggggaaggccagaatggtatcgtgtttcttgtttctgggcagtgggctgcgtcctcccaagcaggactgaagggttcagaatcgcttttcctcaggctgagaggttatgagcagctccttgttcccgaagtcccaccaggccgtcatgtggaacgccatgttggttaagacaacagtgtactccaggatggcaaagatggtgtacactccagcctcacaatacatgttgtgccgaaagtagacagccagcgccgagaagaaggagatgaagttgatgatgaagagccgctgtttccagctgtaggacttgcgatcctagggaatgggctgtctgatcactctgcagcttgctgggtatgagagcgtgggctcccctctcagccctaactcctaagggctgggccttatctcccttggctcccactagcggtcatggaagggagcacaggcaggggcagcaagaatgacgactatgtgttcacgtccctgcctctgggggagtgatgggccgaggagcagtggtattcctgccgcttccacttcagggggatggagtatgaaagttacatggagtcacccaccaaccccacctccaaatactgtgggggaaaagaaacccatgtacatgggtggggcgctggaattatgacagaccagtcctctgacactgttcctaactcactgccgcctagatgcgactcctcattctatccccatttgcagcctccatctcttctattctccagtctcccacactacccaaacacagtgctatagtcctagattctgaccaaccaccctcagtttgttcccaagccccagccccaaccccagcacccctctgccagggttcccattagaactcagttcccacctcaccattacccgaatcctgaggacagatgtccttgattttcttctgggctgccttggagcccccgctagggatagaccgtacctcctgacttactgtgtgcttcttggtcaaccgccagagaatgcaggtgaggagcatgtgcccgagggatgaggcaatgaacacaatgaaagcattttcgtggatggctggagggaaagaggattgggagccacattgcagggagtgcccacaccacgaagtaggaaggtccgaatgtggtaggggcaggcccgtcccctcagggaacacttccccactcctccctcatccaggcacccactgaagtcctcggaggaggagacataagtgagcactagcaacgcgaggttctccacgacattgaggccgaagttgaggcggcagagcgggcgatagcaggaacacggggaggtgcagctgaggtagtggttccagtaggcgaaggccaccaagaagcgaggcgccgagtgcaggccgatgcagaaacgccacacgtagcgctggggcacctccccgccgatggctgagctcaccgagggcaggtaattgggcacctagagagttgtgacctgtctgggcatctgcctctgccagccccgcccatgtggagaaccttctctccatctgacaaaatcactcttgcctctgctccagcccctccccttccaagaagtcctccttcagatgtccccatacctctcccaaaagacctctccttccaggtcctaggcccaaagtgctggattctcattccccagctatcctgggatttgtgcagcagcatggtggcaccttctccatctcccccgcagactggaacctgcctgtgtttggtcaatgtgtagatgggttcagatgctcttcacccatagctcagagctgtgcctccactaagaccctgggtgagttccaaggcctcagattcagtccagaggacagggatgagtcacagaccatctgagcttccttagaacagtgctggattcactgctcagctaagatgttcctcagtctgctcccagcgccactcactcctctaggcaggtgtgccaaggtggtagaatggcacccctgctctgatcatgattaacaaagtgggtgggctgggcacgatggctcacatctgtaatcccagcaagaatatggatttttaaaagtttccaaaactgtggaaatggccagtccattgcccacactttctgtgcacttctgcagacctccaacgagggccagcgcagtgccagagcccagcaacccagcaagggaatgaatttgctctaactatggagggacagtcttcggaagtggagttcttaaggaccatcattcctttctttcaatgagatgccagactgctgagaaggtgagcaatgctgcaggcggctcatagggcagcccacaggtaggcctggggcaagactagccatggggcttcacagcctccacaaaaaaggagatggattcc

SEQ ID NO: 517 - DNA, 1731 bp, Homo sapiens
atattgatctcctggagattcgaaatggaccaagatcccatgaatcattccaagaaatggatcttaatgatgactggaaactctctaaagatgaggttaaagcatatttaaagaaggagtttgaaaaacatggtgcggtggtgaatgaaagtcatcatgatgctttggtggaggatatttttgataaagaagatgaagacaaagatgggtttatatctgccagagaatttacatataaacacgatgagttatagagatacatctacccttttaatatagcactcatctttcaagagagggcagtcatctttaaagaacattttatttttatacaatgttctttcttgctttgttttttatttttatatattttttctgactcctatttaaagaaccccttaggtttctaagtacccatttctttctgataagttattgggaagaaaaagctaattggtctttgaatagaagacttctggacaatttttcactttcacagatatgaagctttgttttactttctcacttataaatttaaaatgttgcaactgggaatataccacgacatgagaccaggttatagcacaaattagcaccctatatttctgcttccctctattttctccaagttagaggtcaacatttgaaaagccttttgcaatagcccaaggcttgctattttcatgttataatgaaatagtttatgtgtaactggctctgagtctctgcttgaggaccagaggaaaatggttgttggacctgacttgttaatggctactgctttactaaggagatgtgcaatgctgaagttagaaacaaggttaatagccaggcatggtggctcatgcctgtaatcccagcactttgggaggctgaggcgggcggatcacctgaggttgggagttcgagaccagcctgaccaacacggagaaaccctatctctactaaaaatacaaaagtagccgggcgtggtgatgcgtgcctgtaatcccagctacccaggaaggctgaggcggcagaatcacttgaacccggaggcggaggttgcggtaagccgagatcacctccagcctggacactctgtctcgaaaaaaagaaaagaaacacggttaataacatataaatatgtatgcattgagacatgctacctaggacttaagctgatgaagcttggctcctagtgattggtggcctattatgataaatagaccaaatcatttatgtgtgagtttctttgtaataaaatgtatcaatatgttatagatgaggtagaaagttatatttatattcaatatttacttcttaaggctagcggaatatccttcctggttctttaatgggtagtctatagtatattatactacaataacattgtatcataagataaagtagtaaaccagtctacattttcccatttctgtctcatcaaaaactgaagttagctgggtgtggtggctcatgcctgtaatcccagcactttgggggccaaggagggtggatcacttgagatcaggagttcaagaccagcctggccaacatggtgaaaccttgtctctactaaaaatacaaaaattagccaggcgtggtggtgcacacctgtagtcccagctactcgggaggctgagacaggagatttgcttgaacccgggaggcggaggttgcagtgagccaagattgtgccactgcactccagcctgggtgacagagcaagactccatctcaaaaaaaaaa

SEQ ID NO: 518 - DNA, 1327 bp, Homo sapiens
cccacgcgtccgcggacgcgtggggaaagaaggcgccgcagctaagcccaggtctctcctccgcaggttccagctcctttcctggagcgtgtgtgggggcaacaaggacccatgggttcaggaattgatgagctgtcttgatctcaaagaatgtggacatgcttactcggggattgtggcccaccagaagcatttacttcctaccagccccccaatttctcaggcctcagagggggcatcttcagatatccacacccctgcccagatgctcctgtccaccttgcagtccactcagcgccccaccctcccagtaggatcactgtcctcggacaaagagctcactcgtcccaatgaaaccaccattcacactgcgggccacagtctggcagctgggcctgaggctggggagaaccagaagcagccggaaaaaaatgctggtcccacagccaggacatcagccacagtgccggtcctgtgcctcctggccatcatcttcatcctcaccgcagccctttcctatgtgctgtgcaagaggaggagggggcagtcaccgcagtcctctccagatctgccggttcattatatacctgtggcacctgactctaatacctgagccaagaatggaagcttgtgaggagacggactctatgttgcccaggctgttatggaactcctgagtcaagtgatcctcccaccttggcctctgaaggtgcgaggattataggcgtcacctaccacatccagcctacacgtatttgttaatatctaacataggactaaccagccactgccctctcttaggcccctcatttaaaaacggttatactataaaatctgcttttcacactgggtgataataacttggacaaattctatgtgtattttgttttgttttgctttgctttgttttgagacggagtctcgctctgtcatccaggctggagtgcagtggcatgatctcggctcactgcaacccccatctcccaggttcaagcgattctccctggcctcctcctgagtaagctgggactacaggtgctcaccaccacacccggctaattttttgtatttttagtagagatggggcgctgagtggactgcaaggtggacaggagcatctgggcaggggtgtggatatctgaagatgccccctctgaggcctgagaaattggggggctggtaggaagtaaatgcttctggtgggccacaatccccgagtaagcatgtccacattctttgagatcaagacagctcatcaattcctgaacccatgggtccttgttgcctccacacacgctccaggaaaggagctggaacctgcggagga

SEQ ID NO: 519 - DNA, 1002 bp, Homo sapiens
ttttcaaccttaaaaaattttaatggaattttcttcttttttttttttctttaaataacaatttgacaaaagggtgaaaaaatcctaaacaaggtattgaggccagtgtccaggctgcattcagttcacaaaactgtcctcaggacgttgcatggaactggaaatgtgtataattacagaagaaaacagggaggacttagtgcagagaggagacgagtgtggacgggcaacagcatccttagtctttcatatttatatatggtatatgtattttctatatatatatttatatattttacatccaggtatcccagtcatctgtaccatttcccagggagacatgggtgcttccaaggcgagacaggaaagggttaggcagggaaggggcagcgacggtgcaggctggggcttggctcacagaagctgcaggagcttcagcgactgtaagagggccccgggctccgcagacgccaggtactggcagcaaagccagtcctccagctccacgccccgcctgcgatccaccgccttctccgcaaacttcatcatcatcagggcccgcttcatgtcgatccagttgtgcagcgtgccgcacagcgcctcctccgaggtgcccggctgctgcaccagctcgcgccgaggcccccacagcaggcactgcagcacgcgcttggcctcgccgatgcggatacgcttgatggggtcggcctccagtagcagatgtgccagctgctgcaggccgggtgagtagagggacagcgcgggcagcggcggcaggtcctcctgccggtagtctctctcccgcagctgggcgcgcacctcgaacgggttgggttggtgcagcagctcgtagatgaggatgcctgtctggaactcatcgaacttgcggtactgggaagcagacacgatatcgggggccagccgggcctggctcttcttctgctgcaggtttggggtgctgcccggcttctgcttggccttcaaaaagttgctgatgatgag

SEQ ID NO: 520 - DNA, 2966 bp, Homo sapiens
  misc_feature (1)...(2966): n = a,t,c or g
gaaaagaggacttattgttgtcatggcccatgagatgattggaactcaaattgttactgagaggggggtggctctgctggaaagtggaacggaaaaagtgctgctaattgatagccggccatttgtggaatacaatacatcccacattttggaagccattaatatcaactgctccaagcttatgaagcgaaggttgcaacaggacaaagtgttaattacagagctcatccagcattcagcgaaacataaggttgacattgattgcagtcagaaggttgtagtttacgatcaaagctcccaagatgttgcctctctctcttcagactgttttctcactgtacttctgggtaaactggagaagagcttcaactctgttcacctgcttgcaggtgggtttgctgagttctctcgttgtttccctggcctctgtgaaggaaaatccactctagtccctacctgcatttctcagccttgcttacctgttgccaacattgggccaacccgaattcttcccaatctttatcttggctgccagcgagatgtcctcaacaaggagctgatgcagcagaatgggattggttatgtgttaaatgccagcaatacctgtccaaagcctgactttatccccgagtctcatttcctgcgtgtgcctgtgaatgacagcttttgtgagaaaattttgccgtggttggacaaatcagtagatttcattgagaaagcaaaagcctccaatggatgtgttctagtgcactgtttagctgggatctcccgctccgccaccatcgctatcgcctacatcatgaagaggatggacatgtctttagatgaagcttacagatttgtgaaagaaaaaagacctactatatctccaaacttcaattttctgggccaactcctggactatgagaagaagattaagaaccagactggagcatcagggccaaagagcaaactcaagctgctgcacctggagaagccaaatgaacctgtccctgctgtctcagagggtggacagaaaagcgagacgcccctcagtccaccctgtgccgactctgctacctcagaggcagcaggacaaaggcccgtgcatcccgccagcgtgcccagcgtgcccagcgtgcagccgtcgctgttagaggacagcccgctggtacaggcgctcagtgggctgcacctgtccgcagacaggctggaagacagcaataagctcaagcgttccttctctctggatatcaaatcagtttcatattcagccagcatggcagcatccttacatggcttctcctcatcagaagatgctttggaatactacaaaccttccactactctggatgggaccaacaagctatgccagttctcccctgttcaggaactatcggagcagactcccgaaaccagtcctgataaggaggaagccagcatccccaagaagctgcagaccgccaggccttcagacagccagagcaagcgattgcattcggtcagaaccagcagcagtggcaccgcccagaggtcccttttatctccactgcatcgaagtgggagcgtggaggacaattaccacaccagcttccttttcggcctttccaccagccagcagcacctcacgaagtctgctggcctgggccttaagggctggcactcggatatcttggccccccagacctctaccccttccctgaccagcagctggtattttgccacagagtcctcacacttctactctgcctcagccatctacggaggcagtgccagttactctgcctacagctgcagccagctgcccacttgcggagaccaagtctattctgtgcgcaggcggcagaagccaagtgacagagctgactcgcggcggagctggcatgaagagagcccctttgaaaagcagtttaaacgcagaagctgccaaatggaatttggagagagcatcatgtcagagaacaggtcacgggaagagctggggaaagtgggcagtcagtctagcttttcgggcagcatggaaatcattgaggtctcctgagaagaaagacacttgtgacttctatagacaatttttttttcttgttcacaaaaaaattccctgtaaatctgaaatatatatatgtacatacatatatatttttggaaaatggagctatggtgtaaaagcaacaggtggatcaacccagttgttactctcttaacatctgcatttgagagatcagctaatacttctctcaacaaaaatggaagggcagatgctagaatcccccctagacggaggaaaaccattttattcagtgaattacacatcctcttgttcttaaaaaagcaagtgtctttggtgttggaggacaaaatcccctaccattttcacgttgtgctactaagagatctcaaatattagtctttgtccggacccttccatagtacaccttagcgctgagactgagccagcttgggggtcaggtaggtagaccctgttagggacagagcctagtggtaaatccaagagaaatgatcctatccaaagctgattcacaaacccacgctcacctgacagccgagggacacgagcatcactctgctggacggaccattaggggccttgccaaggtctaccttagagcaaacccagtacctcagacaggaaagtcggggctttgaccactaccatatctggtagcccattttctaggcattgtgaataggtaggtagctagtcacacttttcagaccaattcaaactgtctatgcacaaaattcccgtgggcctagatggagataatttttttttcttctcagctttatgaagagaagggaaactgtctaggattcagctgaaccaccaggaacctggcaacatcacgatttaagctaaggttgggaggctaacgagtctacctccctctttgtaaatcaaagaattgtttnaaatgggattgtcaatcctttaaataaagatgaacttggtttcaaaaaaaaaa

SEQ ID NO: 521 - DNA, 1041 bp, Homo sapiens
tggggcaaggatttcatgagcatcctcctctaaacgcgtgtcaagacaaaagatgcttcagctttggaaacttgttctcctgtgcggcgtgctcactgggacctcagagtctcttcttgacaatcttggcaatgacctaagcaatgtcgtggataagctggaacctgttcttcacgagggacttgagacagttgacaatactcttaaaggcatccttgagaaactgaaggtcgacctaggagtgcttcagaaatccagtgcttggcaactggccaagcagaaggcccaggaagctgagaaattgctgaacaatgtcatttctaagctgcttccaactaacacggacatttttgggttgaaaatcagcaactccctcatcctggatgtcaaagctgaaccgatcgatgatggcaaaggccttaacctgagcttccctgtcaccgcgaatgtcactgaggccgggcccatcattgaccagattatcaacactgagagcctccttggacctcctgaccgcagtcacaattgaaactgatccccagacacaccatcctgttgccggactgggagaatgcgccagagacccaaccagcatctcactttgcttgctggacaaacacagccaaatcatcaacaagttcgtgaatagcgtgatcaacacgctgaaaagcactgtatcctccctgctgcagaaggagatatgtccactgatccgcatcttcatccactccctggatgtgaatgtcattcagcaggtcgtcgataatcctcagcacaaaacccagctgcaaaccctcatctgaagaggacgaatgaggaggaccactgtggtgcatgctgattggttcccagtggcttgccccacccccttatagcatctccctccaggaagctgctgccaccacctaaccagcgtgaaagcctgagtcccaccagaaggaccttcccagataccccttctcctcacagtcagaacagcagcctctacacatgttgtcctgcccctggcaataaaggcccatttctgcaccaaaaaaaaaa

SEQ ID NO: 522 - DNA, 1295 bp, Homo sapiens
ttttttttttttaaggttgttggaaataatttttatttaacagatataaaaaaaattcttaacatttacaaattgtacaaagattggtagcttttatatttttttaaaaatgctatactaagagaaaaaacaaaagaccacaacaatattccaaattataggttgagagaatgtgactatgaagaaagtattctaaccaactaaaaaaaatattgaaaccacttttgattgaagcaaaatgaataatgctagatttaaaaacagtgtgaaatcacactttggtctgtaaacatatttagctttgcttttcattcagatgtatacataaacttatttaaaatgtcatttaagtgaaccattccaaggcataataaaaaaagaggtagcaaatgaaaattaaagcatttattttggtagttcttcaataatgatgcgagaaactgaattccatccagtagaagcatctccttttgggtaatctgaacaagtaccaacccagatagcaacatccactaatccagcaccaattccttcacaaagtccttccacagaagaagtgcgatgaatattaattgttgaattcatttcagggcttccttggtccaaataaattatagcttcaatgggaagaggtcctgaacattcagctccattgaatgtgaaataccaacgctgacagcatgcatttctgcattttagccgaagtgagccactgaacaaaactcttagagcactatttgaacgcatctttgtaaatgtacactccgcaattttcccaagatctatgccataattcaatgaactccatgaacactgcttgtagttgggtgtccaggactcctcaaagctttccctcagacattcccccttttctcctttgaatccatcccgacctgggatcccaggtgtacccggaatgccattggccccagggctcccgtctcgaccaggcactcctgctggcccttgtaagcacattccattatacaggtccaccacctccctctgccggagctgcgccttttgcttccccttggggatctcagaggcgctcgacggcgcgggcagctgcagcagcaggagcagcaggaggccgcggagccgctgcggggaggcggcggggccctggggtcgcatggctcccggctgccgggcagcgcggagctggaggcggaggagaccgaggagaggaacgtggtcagcgtctggctccgccgcgctccgaggccgccgcaggctgcatcaatgcgcctttcacccgagcgcctctctccctcccttaattcctcccgccc

SEQ ID NO: 523 - DNA, 2014 bp, Homo sapiens
ttttttttttttactgttttatccaaatttattctcagggaaaaagaaagtagtggctctacgcaactttttcattcaccaaccacctttccatgcatcagaacctatgctgtgattgttagctgaacttcaatagtttccacctacttaagagagatgcctcaaacaaattaactttattttcagacaacaggtccaagaagacttcacagctcaatcatgacgaacatgtggctgtttcctcacagccaggaaccctcggtattagaagaaaactccaaccccccacaccatcatctagcctcttttctcactgtgaagaactgatgagacagaattcctgagaagggaacatttaggtaatctgggatagaagggcatggaaggactggacaaaactaaggcctccccatggaaggaagggaaaagaatattacaaaacagactaaccagaaaaaccaagaccccatcaagtatccttcagggataaaacaagaggccactcctagatgcctcctgattaaaaggttgtcccatgccctacagaggcggaggataaatcctaagaaacagaaatgtataaccagccccaatgcttcccatacttctgcattaggtcagtgtgaacatggctttgctcccaatggtcagacctgacatgggtccttctgaagatggtgggtcaggtatatcccagccaccctcaccagagaatacatctatgacaaacccaaattcctaatcctgaagtactttgagccactctacattgtggccactcaataatagaataaatttgtgaaaaagctgcatgttttaatttaggaaatgagtagaagttcacaagcaacccagaataggtgccagcagtttgctccagtgggccacaccacagcagcagctcaggctctgcagaatcactgtgtccagtgcttcctgagatgttctttcagctgaggaatggaaggcagcagctgctggcactcatgacaacgaaggggcagcttcaagagctcaggcatcccatctcggacagttactctaccagcctcttgtaccatctcgatcacagcttgtgattctaggaagtattctgtattgaaagaattccaatgttttttgtttttaaggcaaggagaatcaaaatcctggctgatcacatgaagatgtacatggctcatactcggaatggcgtggtagcccaatcggaagcggagtttgctggacccagcaaaatctacaatcaccttttcccccacagtgtgcatatgcttaaggagttcaaggtgttcccctggccacagccttcagactggaaatggaggtccacggtaagaccagccaatggtaacgggcctttgggtatttatcctttatcaccaccacctgctcatctttgtaaacctgcattttggggtcctgcatagaaatcttcaagccttgactccagtggcccagggattcctttttgataggtgcatcttttcccttctttaggggcacagagcattggccagagttgctcccaggttccagccctgtcccagcctcagcttcctgagcagcatccctttctatagaatcactgttgcctgatctctttctcttcctgtgtgtttccaggccagggttctttgcctcttcctcaaactctacaatatatggataaagttcattcaccatgtggagaacctggccaggctgcagcttcacctcttggtccttcccaattacgactgagtcaatgctggtgggattgactcctacctgctttaccttgacatatcccttgttacactctgctttcaactgtacttgctgtcgagaacatttcttatcagtgatcttggtctctgggccacgcccaatcacaactgcttccaaatgtggaagtctgattcgctggtgccggctgtcctgtctcaccaaccagcacacccgcatcatcactctccagaagtcggagacggacaaattcaccctcgtgccaagcatggcggaatgcatctaacag

SEQ ID NO: 524 - DNA, 2151 bp, Homo sapiens
  misc_feature (1)...(2151): n = a,t,c or g
gcccgcggtagtaaacctggatcctttaaaacggcccccccttttttttttttttaatggcaaatagatttaatgcagagtgtcaacttcaattgattgatagtggctgcctagagtgctgtgttgagtaggtttctgaggatgcaccctggcttgaagagaaagactggcaggattaacaatatctaaaatctcacttgtaggagaaaccacaggcaccagagctgccactggtgctggcaccagctccaccaaggccagcgaagagcccaaatgtgagagtggcggtcaggctggcaccagcactgaagccaccactggtgctggcactggcactggcactgttattggtactggtactggcaccagtgctggcactgccactctcttgggctttggctttagcttctgctcccgcctggatccgggctttggcccagggtccgatatcagcttcgtcccagttgcagggcccggcagcattctccgagccgagcccaatgcccattcgagctttaatctcggccctaagccttggcttccaaggtgagcctcagcttgcagccttcaaaatccgcttccattcgccccttnctttcccggggggggactgagctgcccattccctttggatccttccttttgtacccttgcaggcaaacttgaaggactttcatctttgctggtcctcatagtaagagcgcaggcccccagaagaactcatattcaaggggaattgctatgggggactctggcatagtcccaggtacttctgcttcacaaacctcatcagtgatgagcttccttcacgtcccccaagagttgaatgatgtatccccaggcgcagccccaaacttggcgcagcacctcccagatgacagcctcacttggaccgatttccattcattgaagatgatgctaagaagcaccatgagcagacccagcttgggtgagtccttagtcgttcccagtatgcctgcatcagtgggctctaaggtgctgagaagaatgtacaagtggtcattcttatcaatttccttcaattgaatcccaaataccttcttccaaggaatagcctgctcgttcaaatgatttcggggtacacatcagtgtattctttgatgatgtccttcagcatgttccgagcgcttgatgggaatcttcgtctggtctttagccaaaaggtacttcaccaaattcatttgccctcccttgcaaaagggccacatccccaagntggtggtgcttcaggctcttgggatgaactggaacttggcaactctaacggcgaagcccctttgcctacgggctttaaggtgatctccaaggggagagcaaaggctctccgggcccaaagcaagccaaccgagtccttgatgccctgcgggcccaaaaggctatgggaccccttgaagccctgcgggccattgaggccattagagcctttgagacccttcggccacctgtggttccagaagcctgactctgatcactgctgccatcctcttccccatccagatgcttcacctttcgggctttcttggctttgaccttgggccgagtatcctgattctcctgagactgggcagctgcactctcaggctcaggttcatctgctggggcctgagagggtgcagcctcagtctcctgagcctttgtattgaccttcgtatcagccacatggctgacctttttggtctcagtggcaggcattgtcacagcctgcgggtcagcattctgtttcttggtgtcagctgctagactcttgttttcagctgccagaacctgggtatcagtcagctgagtagtagatgaggcctgggtggcaggtgcctcccgagcctctggggtctttgagacctctgtggcctttgagaccccagaggcttttgagaccttcacatcctctgagacctccagtgcctttgaggccttcggtgtctctgggacctccacattctgggtcactgtcaacagagtctgcatcatcgagctactgtccttttctgaagcttcagcctggaagcgagttagacctgcaccactctcgcttgtgtcagacatgtctcaatttggcctggcaagagctgagcctcgtcctcctacaattcccgagtgcgtccactcactccaagcccctccgaagctcgg

SEQ ID NO: 525 - DNA, 1869 bp, Homo sapiens
gcgcggcctcctgtctgcaccggcagcaccatgtcgctcacggtcgtcagcatggcgtgcgttgggttcttcttgctgcagggggcctggccactcatgggtggtcaggacaaacccttcctgtctgcccggcccagcactgtggtgcctcgaggaggacacgtggctcttcagtgtcactatcgtcgtgggtttaacaatttcatgctgtacaaagaagacagaagccacgttcccatcttccacggcagaatattccaggagagcttcatcatgggccctgtgaccccagcacatgcagggacctacagatgtcggggttcacgcccacactccctcactgggtggtcggcacccagcaaccccctggtgatcatggtcacaggaaaccacagaaaaccttccctcctggcccacccagggcccctgctgaaatcaggagagacagtcatcctgcaatgttggtcagatatcatgtttgagcacttctttctgcacaaagaggggatctctaaggacccctcacgcctcgttggacagatccatgatggggtctccaaggccaatttctccatcggtcccatgatgcttgcccttgcagggacctacagatgctacggttctgttactcacaccccctatcagttgtcagctcccagtgatcccctggacatcgtggtcacaggtccatatgagaaaccttctctctcagcccagccgggccccaaggttcaggcaggagagagcgtgaccttgtcctgtagctcccggagctcctatgacatgtaccatctatccagggaggggggagcccatgaacgtaggctccctgcagtgcgcaaggtcaacagaacattccaggcagatttccctctgggccctgccacccacggagggacctacagatgcttcggctctttccgtcactctccctacgagtggtcagacccgagtgacccactgcttgtttctgtcacaggaaacccttcaagtagttggccttcacccacagaaccaagctccaaatctggtaacctcagacacctgcacattctgattgggacctcagtggtcaaaattcctttcaccatcctcctcttctttctccttcatcgctggtgctccaacaaaaaaaaatgctgctgtaatggaccaagagcctgcagggaacagaagtgaacagcgaggattctgatgaacaagaccatcaggaggtgtcatacccataattggaacactgtgttttcacacagagaaaaatcactcgcccttctcagaggcccaagacacccccaacagataccagcatgtacatagaacttccaaatgctgagcccagatccaaagttgtcttctgtccacgagcaccacagtcaggccttgaggggatcttctagggagacaacagccctgtctcaaaaccgagttgccagctcccatgtaccagcagctggaatctgaaggcgtgagtcttcatcttagggcatcgctcctcctcacgccacaaatctggtgcctctctcttgcttacaaatgtctaggtccccactgcctgctggaaagaaaacacactcctttgcttagcccacagttctccatttcacttgacccctgcccacctctccaacctaactggcttacttcctagtctacttgaggctgcaatcacactgaggaactcacaattccaaacatacaagaggctccctcttgacgtggcacttacccacgtgctgttccaccttccctcatgctgtttcacctttcttcggactattttccagccttctgtcagcagtgaaacttataaaattttttgtgatttcaatgtagctgtctcctcttcaaataaacatgtctgccctccaa

SEQ ID NO: 526 - DNA, 6655 bp, Homo sapiens
ataaccatttattagtcgaaagtgtttttaagcacagtcagggtgtaaacagtgcagcattcctgctcccctccgtgggagcagcgtctccttttcaattcatgtgactacagaaggcacttggtgaactgtgcgtgtctgaggtgtggaaaccaggagacgctgctcccacagtcagggtgtaaacagtgcagcattcctgctcccctccgtgggagcagcgtctccttttcaattcatgtgactacagaaggcacttggtgaactgtgcgtgtctgaggtgtggaaaccaggagagggggaaagaattctcaaaggcctgacgtgagaagttggaaaggtttgcaggttagggaatgaattgggagtgggggccggcggcacccatttcggtgactttctccccatttcatgtaaacagaattgccagggaccggttaccgtggatatgtttttctaaaaactcagtgtctgcacaatccattgatagaactggaggatgtgtctgtgtttcctgttgggtttttctcatctcttacatcatacaaacttcaatttttaccttgaatacaggggtagtaggggtggtggtggtggtggtggttgagacagggtctctgttgcccaggctggagtgcaatgatgcaattatagctcattgcagcctcgaagtcctgggctggagcgttcttcctggctcagcctccctagtagctgggaccacaggtgtgtaccaccacgcccagcttatttttaaattcttgtatagatgaggttttactacgttgcccaggctggagggtggtggtttttatattccttgtgtgaggggtgtctgtgatatttggaatttgagaatggatttagacaatgctaagtacagtctgctgggttttgctttgttctgggttgttgttgggttttttttgtttgtttgttttggtttttggttttcttgccgtggtgcaaaactgtagaaagttgcttattcactggccttggttccattgaagtctgcgtctcgagtgtccgtttcctcctcagaaccatctgcattttcaataactctacgtcctccagaccttctagaaggaacgaaagaggtctcgtttcctcgcctgagcttgctcttgagtgcgttcacctcgcggcccatggcctcgttgctctccgtggcctcatccagctcccgctgcagcttcctgcggttggcgttgatgcgctgggactcctcctctgcctcctccagctgcctcttgagctgcttgaccctggcattgcctttctctgcctgctccttgtactgctcggccatcttgcgctcgtcctccacctgcagcaagatttccttcagcttcttgtctttctgcttcagcgacttggtggccgcctgtttctctctggcctcctgctcgacctgctcctctagctgtgcaatcttggcctccagcgccgcgatggtggatttgaacttggacttgacggccccctccatctcgtggagcttgctccggagctccttgttctgccgctcgagctgctgccgggcactctcattcttctgggccgtgctgcgctctgtggccagctcgttgctgagctgctcggcctgctgtgtggctttgcggacccggtcgctcatggcctccatgttgccctgctcctcctccagctcctcctccagctgggcgatccgggcctccaggcggcgcttctcgtcctggagtgcgttccttcccgacaggctactggcccagctcctctgccagttcctccttcttcgaggtccgctttgtttgcgaccctcttcagcggcggcgaggtccttcttgtagctgcatgaggtcgtgcttccaagctcttggctttcttctcattctctttgggctgtggcaaaagatctcatctctggaggcacggggcatcttccagctctctttgaaagtccttcatctgagcctgcagtttgcgtagctgcttgatggctttccctcccctccctttgatggcagagtcggcctaaagatccaaggttcttacagggtcccatcccagctttatttttgctgcagctgccagggcacgttgctttcgctcgtcttccagttccgtctcatactcgtgaagctgtctctgcagatgccctcctgctcgtcctcattctgctcggttcgggcttggagataccctttcgaaactggcccttgaaggcgcctgcatgttgacttccagccgcagtttgggcgtccctccgtgggcttgcaagctcggtccttccaagctcttccaactggcgtcttcatctcctccaatctggggtctcccagggcccggcttggacttctcccagatcatgggacagttcttgcccaacgtcaatccttggaagctgacccaggtcttcccatttctggctttgagcattttgttggtccgctcgagttcctctttggcttccaaggcctcttcaagggcccgagcccagggacagggccttggtttccttctccctggcttctgcctcaactctgtccctctcatccgcgtatttggaagagatgtttttctcctcggctaacaactgatcaaatttcctctgcttcttttccaggttggacaccagttgccgctggttgtccaaatcaacaaccaggtcgtccagctcctgctgaagcctgttcttggtcttttccagtttatcatacgcggccgccttctcctcgtactgctgggtgaggttctcgatctccttctggaacctcttcttcccctcttccagagcttccacggtgctggcaaagtcctgcagcttcttcttcgagtcggagagctggatgttgagagtggagatgtggcgctccaggttctgcttggcctccatctcctcgtccagctggtcttgcaggctgttccgctcctcctccagctaggcgcagcgtacgtagacacgttgagcttctgccgggattcttcttgaagcagctcctgggtgtcctggtagctgggaactgagggacgccacgtccttggccagcttaatggccttcccctcggcctcgttaagcatcccctgtgacgctctcaacttcattctgcaggcttgtggactttgtcattgagctccgcccgggcccgctccccatcgctgcacttggactgcagctcctgcacctgcgcctgcagcttcttcattctatgttccacctcctgcttgggcctggcccaggacccgcagctccccggccagggtctgtgttctctttctccagcgtctgcttattcttgtctaggttcgccttggccctcttttgactgctcaagctgctctgtgaggctctgcaccgcctgtgcgtgtttctgcctcatctcctggacctgagcctcatgggaccgcgtctcttcattcagggcccctcttcagcaccgtcacctcctgctccctcttggccctgagctcctgctgagtggctgtgctgtccagtgtgtcttccagctctgtctttagggcctccagctcctcgccgaggtctcgcttctgcttttcagccttgttcctggcggcccgctctgagtccaggtcctcctggaggtctgagatgtggccctccagctcccggatcttcttcagggcattgttcttctgagcgatttcatcgtcaagcctggccagggccgcctgcagctcctcctccttcttggccagctgcatcttgagctctgcgatctgcgcctggaggtcagcgatctgctcgtggaagtcgctggcatcaccctccagcttccgtttcagcttctccagctcctgtcggctcttctcttccttctttagccgcacttccagttctgaaatcatagattcatgcttgtttttcagcttggtaagattcttggccttttcttcctcttctgcaagatttgtcgttaagtcactaatcctctcctcaaggagttttcgttcttttgatagtttattgttctgatcatccatgaccaggatctcatcctccagtttcttgatcttggcctcagccgtgaccttctcaagttgcagcttctgcctggcagcttcctcctcctccagctgttcttcaaggtccagcatctgctgggccatcttcttcctttcagcctgtagctgctggcccctgtcttcctcctcctccaggcgggcctccatctcatgcagtatctcctccagctcctgcttcttggccgccagccgcacccgcatctcctcagcctctgcatacagctctgtctctgcctgcagctgttcctgtagcaggttcttctcctcggtcagctgcgagtgcttctgttccagctccttaagctcattctctgccttctgctgccgctccttggtcttctgcagttcatcctccttggcctgcatctcctactcctgccgtgtcacctgcagcagtggctacactttggtgaaaagcctgcaccactgccagttccgcagcttgatgtatgcggcgcagttcctctgaatcaccttcatggcggtcagctgctgctgcctcttggcaaaagcctttctggccaagtagccacgacacatcgcctggaaggccatgatgacatcggtgatcttcaaatctcgctcctcctctaggtgggccaggacgccagttcggaagaagattttgctctgccctatcctgtataagttggggtcaagttccagggctttgatcatgagaatgcaggcctgcttcccgtccatgaagcctttggggatggcattcgccgccaggatctcgtaccgttggcggaactcctggaagacgatccggttggggaagccctgccggcagatgcgaatgccttccagcaccccattgcaccgcagctgctccagcaccaggaacgcatccagcttgccggacctcttctcgtggttggggatgatgcagcgcacgaagttgggcgtggtgttgcgtagcgtggtcatcagcttgcccagctgctccttgtacagctgccccactgtgcggaacatgcccttcttggtcttggaggcgctgggcagcgagctctccgtcatcttggccatctggtccaggcccacgatgcggtccacgtccttccacaggtcggccacaaacttgtcggaggaggcattgagcagggaagtcacgttgtcattcagcgggtccatattcttggtcagccaggcactcgcattatagtctaccttcccagcataatggatgatggagaactcagtcttgtccttgagctgcttgggcttctggaacttggggtggctgccctgctccgtgcacagcttctccacgaaagacttgtccgtggctttggggaaccagcattcctcgtccagcagggccagcacacctggagggttgttcggtcgctcgatgagctcgatgcagggctgtaggtccagcccaaagtcgatgaagttccactcgatgccctcgcgctggtactcctcctgctccaaggatgaacatggtgtggttgaagagctgctgcagcttctcgttggtgtagttgatgcacagctgctcgaaggagttcacctcaaagatctcaaatccagctatatccaggatccccaggaaggaagccccttgccgatgggtcttgtccagggctttgttcacgcgggtgagtatccagcggaaaaggcgctcatatgttgccttggccaaagcctctacagcaaagtcagcctgttcttttgtctgagctttctgtaccacatctcgcccaaccttgatacgaggagtgaggatggatctggtgaaatctgtcacattaattcccatgaggtggcaaactttctgagcagctgtgttatctggcatggacgcctggtctgtgtttctttccttcttgaagacgatatttccaagctgcaggaccgatgataccaccttcaatatggatagctgctcctcctcgctgaaacccatgattgccatggcctccacggtttcctggaacatctcatcatcctgggctgctgggatgggcacaaagccattggagaggaaggtgtagttgttgaagccctccaaaagcaagtcacttctcatcttctccttggctccagcaatcatgtagtaaaagatgtggaatgtcctctcgtctctggcttggcgaattgcccgtgatttttctagcagataggtctcaatgttggctcccacgatgtaacccgtgacgtcgaagttgatgcggatgaatttgccgaatcgtgaggagttgtcgttcttcactgttttggcgttgccgaaagcctccagaatcgggtttgcttgtagaagctgcttttccagctctcccgtgatacttgtgtctttcttgcccttgtgggaggaggccaccacggccaggtactgaatgaccttcttggtgttttcggttttcccggctccagactcgcctgtgcatagaatggactggtcctcccgatcttgaagcatgctccggtaggccgtgtctgcgatggcgtagatgtgaggcggcatctcgtgcctcttcttgcccttgtacatgtcgacgatcttctccgagtagatgggcaggtgtttataggggttgaccaccacgcagaagaggccagagtacgtatatattagccctgagaagtaccgctccctcaggttgtgtagca

SEQ ID NO: 527 - DNA, 1081 bp, Homo sapiens
  misc_feature (1)...(1081): n = a,t,c or g
aaactacattttgcaaagtcattgaactctgagctcagttgcagtactcgggaagccatgcaggatgaagatggatacatcaccttaaatattaaaactcggaaaccagctctcgtctccgttggccctgcatcctcctcctggtggcgtgtgatggctttgattctgctgatcctgtgcgtggggatggttgtcgggctggtggctctggggatttggtctgtcatgcagcgcaattacctacaagatgagaatgaaaatcgcacaggaactctgcaacaattagcaaagcgcttctgtcaatatgtggtaaaacaatcagaactaaagggcactttcaaaggtcataaatgcagcccctgtgacacaaactggagatattatggagatagctgctatgggttcttcaggcacaacttaacatgggaagagagtaagcagtactgcactgacatgaatgctactctcctgaagattgacaaccggaacattgtggagtacatcaaagccagggactcatttaattcgttgggtcggattatctcgccagaagtcgaatgaggtctggaagtgggaggatggctcggttatctcagaaaatatgtttgagtttttggaagatggaaaaggaaatatgaattgtgcttattttcataatgggaaaatgcaccctaccttctgtgagaacaaacattatttaaatgtgtgaagaggaaggctggccatgacccaaggtggacccaactacccttaatgccaaagaggtggacaggataacacagataagggctttattgtacaataaaagatatgtatgaatgcatcagtagcctgaaaattgccttatttctccctttcttctcactggagttatttttaatattatctttcctatcagaattacctagtcccttctttgaatatacagaagccatcacgtgagtttatcatttgcttcccaattgttctattttcctttaattttctttcttcttgtccttcatttctaattacctgaacatggtatgatttactgcatcttcagatatacacatataacatcaaaantnaggccaatata

SEQ ID NO: 528 - DNA, 1098 bp, Homo sapiens
tttaactccccctcttcttaagagaattttaatgaagctgagataagaggcatatttacttgcagtttgccccattgttaccctggattcctccgagcgcacaagcttaccgcaaggctgactgtggatgtacttgggaatctctcgtcggctgtcctcaatgctcacgttcttagcataccttcaccctagagaaaggcccccacatcgggcgccagatgaaggggtggcctgcccctccacacctgtgggtatttctagtcaggtgggatgagagactgagaaaagaaagaagacacagagacaaagtatagagaaacaacagtgggcccaggggaccggcactcagcacaccaaggacctgcaccggcaccggcctctgagttccctcagtttttattgactattattttcattatttcagcaaaaaggaatgtagtaggacagcagggtgataataaggagaaggtcaacaaaaaaaacatgtgagcaaaagaatctatatcataattaagttcaagggaaggtactatgcctggacgtgcacgtaggccagatttatgtttctctccacccaaacatctcagtggagtaaagaataacaaggcagcactactgccaacatgtctcgcctcccgccacagggcagcttttctcccatctcagagttgaacaaatgtacgatcgggttttacaccgagacattcagttcccaggggcaagcaggagacagtggccttcctccatctcaactgcaagaggctttcctcttttactaatccacctcagcacagaccctttatgggtgtcaggctgggggaccatcaggtctttctcatcccacgaggccatatttcagacaatcacatggggagaaaccttggacaatacgccgctttcaagggcagggctccctgcggctttccacggtgcattgtgcccctggtttattgagactagagaatggtgatgacttttaccaagtatactgcttgcaaatattttgttaacaaggcacgtcctgcacagccctacatcccttaaaccttgatttcatacacacatgtttttgtgagctccaggttgggtcaaagtggt

SEQ ID NO: 529 - DNA, 1995 bp, Homo sapiens
ttttttttttttgtgggtaaaaccatttttattaactgaccaaagcacatcattttgttttctgatttgaggtaaaatcataaaacacagttcacaagaaaatacaatgactatttaaccacaattacaagtttgaaatctcactaggtgttcatatacttttacaaattcatacaactgtatagtctacttaagcttagtgttaaccaaaagagcaatatcaaagacctagacacttgactactacttttgcagtgggtatagttttataacaacagaataactgttaccttatgaatatactttactttaaaaaccacttgactagcgactgtactgtttcctcgtggttcaggggtgtgcatgaaggctcttaggagagcaaacacctgttcctattctgtatgtccctccctcatttcaaatgagagtaaccaattgagtaaaataaccaaataaccattgccccaccatgaacatggggcttgggaagacagtcctacaatcttcatcatatatttaggtttttaggccagccagctctttttttccaaagctttcttttgaatgttcagatcctattaatcctaactatagactactgtgtttgtgagggtgtctgagtgtctatgtgagggcaaggacaacagtgcagtccagaaacacagaaaatatgcttttttgcagctgagctctgttttgagatttcattttgttactggacagcgcttaatccataccaaagtctttggaacactgcagatttgctttagaggtagataaaacagaaatcatgcagttaagtcaattgagaaaaaaaaagggatttgttgtctttacagaacatcatgactaaaagttgatcctttgctcttggtgcacatttaagatttttacctgttttgggaaatacccaagtcttccttgtctctcaggaaaaacacatttaaattcatcctgtactaactacagatagaagaacagcagtattaccatgtgtattgcagcactgcagttcactttctggatttgtgacacacaaacacatcatgtgacgtcgcatgcacgcgtgcttgggccctcgagggatcctctagagcggccgcccttttttttttctttttcattctaagaagttaattttattagtgtcactagtgatgttaattaaaaaacttatagcaagtgctcaaaactttctaaatattgtaatcactatgttttaaagacagagtggactgttacaaatgattttgcaaaatacaaaaatagatatacttccactgaaatgctttaatcatttttccgggcactctcatcttttggttcttcctcatctgagtacacagtgggctcctccccctccttcagcagtttgcccacgtgatgatacttgaaagtgaactgagactcccagtcactcagagtctccctgctgggcagcaagtgaggtcagaaagggtcatcgttactcatccttcaggggcttccttatccagggcaaaattgtaggcaaggcccctgggatgcattttcttccagcaaagaccccatacgggcccctcgggccccgtaagaaatttgcgggcctttgggtcacatcgaacaccttgccgttgatggcccatgagtatggcgcggggtcctggacgccgtcgaagcgccgcagcttcggcggggggtgaagtcgcgccgcttgaggcggggcagagggggcggctcgtcgtcgtcgctgtcgccgcttggccgccggctggtccccgcgcacgatcttgtagagcaggaagatgcatgaggccaagcagcagcaggttgagcggcgacgtgaaaatctcatgcagcagcccgccgctctccagatcgcttgggtcggcgccagtcgccaccacatcctcggcagccatgatctctggagtaaaggttgggccgcgctaggcagggatccggaactcgccactttctcctccctctgagcgagcgagtggcgcgcggggt

SEQ ID NO: 530 - DNA, 766 bp, Homo sapiens
ttttttttttttaataaaaccataacaaatctttcattaaagatctactgagaccttggctgaaatcatctattattgttgctagttagcctctcttctatagttgggtaatgtgtgtcttgccactgtgtttgccagctctcccaagtgaaaagaacactttttataaaaaaattaattgctccaagttttcaggcccaggggaggctctcccattctcctccttcaataagtcccgtccaggtaagaggtgatcttgtggataaattcatcatacttcactttgccattgggttcgatatctgccttccctgaagagatcatcccacttccttgtgggtgagcttctcccccagactcgtgagttttgaccgcaggtcggacgccatgacgtaacctttcttctccttgtccaccatcaacatggctagaagaatttctttctttgggtcttcttgttttatttgcatgtgcataatggtcagaaaagtggagaaatccagctctccatttccgtctatcccgtgggtctgcaggtgccgctgcacctcccctggcgtcgggctggcccccaggcacctcatggccaccatgaggtcggtggcttttatcttccccctctgctgcttgtcatacagggagaagcattccttgtactcattaatttggtcttgggaaagaaacttggccattctggggcctcagctgctacccgtgggcttgctgctcccagaaccgcgttcagttccctttcctccctcgtgcc

SEQ ID NO: 531 - DNA, 1891 bp, Homo sapiens
tgcaggaattcggcacgaggctgagcggatcctcacacgactgtgatccgattctttccagcggcttctgcaaccaagcgggtcttacccccggtcctccgcgtctccagtcctcgcacctggaaccccaacgtccccgagagtccccgaatccccgctcccaggctacctaagaggatgagcggtgctccgacggccggggcagccctgatgctctgcgccgccaccgccgtgctactgagcgctcagggcggacccgtgcagtccaagtcgccgcgctttgcgtcctgggacgagatgaatgtcctggcgcacggactcctgcagctcggccaggggctgcgcgaacacgcggagcgcacccgcagtcagctgagcgcgctggagcggcgcctgagcgcgtgcgggtccgcctgtcagggaaccgaggggtccaccgacctcccgttagcccctgagagccgggtggaccctgaggtccttcacagcctgcagacacaactcaaggctcagaacagcaggatccagcaactcttccacaaggtggcccagcagcagcggcacctggagaagcagcacctgcgaattcagcatctgcaaagccagtttggcctcctggaccacaagcacctagaccatgaggtggccaagcctgcccgaagaaagaggctgcccgagatggcccagccagttgacccggctcacaatgtcagccgcctgcaccggctgcccagggattgccaggagctgttccaggttggggagaggcagagtggactatttgaaatccagcctcaggggtctccgccatttttggtgaactgcaagatgacctcagatggaggctggacagtaattcagaggcgccacgatggctcagtggacttcaaccggccctgggaagcctacaaggcggggtttggggatccccacggcgagttctggctgggtctggagaaggtgcatagcatcacgggggaccgcaacagccgcctggccgtgcagctgcgggactgggatggcaacgccgagttgctgcagttctccgtgcacctgggtggcgaggacacggcctatagcctgcagctcactgcacccgtggccggccagctgggcgccaccaccgtcccacccagcggcctctccgtacccttctccacttgggaccaggatcacgacctccgcagggacaagaactgcgccaagagcctctctggaggctggtggtttggcacctgcagccattccaacctcaacggccagtacttccgctccatcccacagcagcggcagaagcttaagaagggaatcttctggaagacctggcggggccgctactacccgctgcaggccaccaccatgttgatccagcccatggcagcagaggcagcctcctagcgtcctggctgggcctggtcccaggcccacgaaagacggtgactcttggctctgcccgaggatgtggccgttccctgcctgggcaggggctccaaggaggggccatctggaaacttgtggacagagaagaagaccacgactggagaagccccctttctgagtgcaggggggctgcatgcgttgcctcctgagatcgaggctgcaggatatgctcagactctagaggcgtggaccaaggggcatggagcttcactccttgctggccagggagttggggactcagagggaccacttggggccagccagactggcctcaatggcggactcagtcacattgactgacggggaccagggcttgtgtgggtcgagagcgccctcatggtgctggtgctgttgtgtgtaggtcccctggggacacaagcaggcgccaatggtatctgggcggagctcacagagttcttggaataaaagcaacctcagaacaaaaaaaaaa

SEQ ID NO: 532 - DNA, 1381 bp, Homo sapiens
ttttttttttttgaaggtataaaacagctaatgttttacttaactattctgaaagtaactgacaggtaataaaaatgtgggttttattagtccactacagtcacaatacaatcgtcatagatttccccttctgtattcatcccaccaaacaccaaacagagcagtgtagcagtctggctttcctcatgtgagtcaccactgtggctcattactttgtcagctgaatcctctttctcagcttcatggttcagagtgagagagttgggaatcttctttctcagaagcacacgtcactggcccatgggaatgataccacatgggaatgggtcccaatcgtcccaggggggtaggaaggagtatccaaatttaaggcaagggtcccaatgctgctcttctgtgtgatactgggtacattgtgtcccaggtgctcctgcaggagtcattccaccaaaggatgtacacatgtttttcccatggccacagctggagtggggaagcacagcctgctggaggcagccccagtgggatttagcttctgccatttcatgtcacttatatcaatgcagtggaggtcatcatagaatctgtcccccgccaagcctccgtggatgaagagctttgtccctgctgccaccatcacatgaccatgccggggagatggaggatttccaagtgtctctggctgtgaccaggtcagagtgtttgcgtcaaacacatgcagcttcgtgtcctgcacgggctgggcacctctctctccgcccccaaagacatatagctggtttccaatggctgccgatgatgtgtggaatgttcttggggatggtggggggctggtcacttctggcgtggtccacgtcctggtttcaggattcaggacttgtagacaatttcgatttcctgattggttggcacctccaaatacccagatacggtcaggtgtgcaggagggaatgaagctagcatgttcataccggggcaagaggcccttgcaggtatctaagtcccactggtgttttcccagatccatggtgtgcacgtctgagaagcttctgtttggatttgctcccccaacaatgaagaccttccctctcttggcattaccaactgggggtaaatatgaacagctgtggccaactcgagcacaggggctgtctccagggacagtcaaggtgtaccatgttgctttcctgggcttgtctccaggttccaagactggcagttgcttcatggtgtcctgcggcctaggccactgacagctgtccccaaagtccagagctcagttaggctggcttcacgtgggcgggacctcccgcagcagccgccgctaccagcccagcaaatctcatccccacgtggcagttctgcggcgacttaggccagt

SEQ ID NO: 533 - DNA, 1986 bp, Homo sapiens
taataataaaaaataactttttaaatgggcaaaggctctgaatagacatttctccaaaaaacatatacaaatggccaatcagcacatgaaaagatgttcaacatcatcagccatcagggaaatacaagtcaaaattgcaatggtatacaattaatataccatttaacattcccaatagtagcctacaacttccatttccactgtggaaaacggtttggaagttcctcacggtagtcaagttacttaactgctctgtaaaatgaagttaatcacattcactttggatgaatgagttcatatatattagctataattactacagcaattatcattgtgtacattattactgattgggtcaaattattaaccccgtctccctaattcatttacttttgttactttggatgaatatttaaagtagtcttgaactgagatatgtatgtaaaggttctatcacattggcatataacatgtgctcaacaaatgaaagctataattatttatttccaaagagtttaaagattaaacttccctcaaaacaaacaaaaggcaaggtaacatcccaagctgtgaggggctgagtctctcctaggtgcagggcagcacaggaactggctgcacaaggccagagaggttacgtggcggctctcttcaaattagaccacacagagcgcttcattccctgtgcagtcttcacatcttcccagtccagtttgacgtctggaacctcatcttctggctctggatccttcctcaagggcccccggggggacgcaaccacaatgggcagagggccacattcctcccggatttccacaacatggaggcccttcttatcagccagctgttgatgggtttcctgtctggagagcccacggaagaggccctgggtgaggctgagcatattaatggacccagagaccttggcatacatgtctttgatgccaatgagccggcagatggtgatgatggccctgtggcagcggaggccgtaacctttgggttgtttcttcatcttgatatgcgtccttttaaatcttaatgaaatatcatggaatattgtatggtcttcatatcgttctatataatgcaaatggtgaactgctctgttctttgctttcctgaaagcatccatccgatcagtagctttcccaatagaaaaacctcaagtatcctggtatcaaaatcctcatatgtttctccacagggaccagggtcaggggggccaagactgatgcctccccatgagtttccactccatcctcgctcccgtttaaccttcatcttcttctttcggtcccactcttctctctgctggatcatgtctgcctccaccttctcctgctcttccttgcttctttgggcaatggtctgcactgctccatttttcataagagggacattcagtccgggccatagaaaaccataacgcccttcaccaatgatctgacccctgttcagatcctttcttttcttctttttagttcttttgcctcttcctttttttgctccagcaccagtctctgctaaagcgcctttccacagctcatctgcagtcaatttagtgaagaaactatatggtctatactgctggctcatcaggtgactgggagaagaaatacagcattgtgtctgcagtgcacggctcaagctggcgtagggatgggtgtctctggttcccagtgatgacaaatggccattgccgagaacactcttccatgccaaaatggaagctgctggtaaggtgtttagggaacactgcctccccaataaatgacctgccgtcccgctacacagcacggggaggcagcccacagcgcgcaccgcggtcgccatgctggagtccgagccgcgcctcggcctccgcccagggcagccttgcccaccgcctaccgcgactgctcctcgtcaaacggcaagccttgggccgcagcggaattcctgaggcccgagtccacgcagcagcgcaggccggggtgagggact

SEQ ID NO: 534 - DNA, 1891 bp, Homo sapiens; identical to SEQ ID NO: 531

SEQ ID NO: 535 - DNA, 1874 bp, Homo sapiens
cggacgcgtgggcgaaccctgaaccctacggtcccgacccgcgggcgaggccgggtacctgggctgggatccggagcaagcgggcgagggcagcgccctaagcaggcccggagcgatggcagccttgatgaccccgggaaccggggccccacccgcgcctggtgacttctccggggaagggagccagggacttcccgacccttcgccagagcccaagcagctcccggagctgatccgcatgaagcgagacggaggccgcctgagcgaagcggacatcaggggcttcgtggccgctgtggtgaatgggagcgcgcagggcgcacagatcggtgcgtggggagggttgggcgttcctgaccccgactgggaggtcagcccgagagactttgggtccctgggggtgcgacggtgccccactaccagcaccggccccagggtgccccaccgctgtgggctgccaccctcacgcgtacccccacataccaggggccatgctgatggccatccgacttcggggcatggatctggaggagacctcggtgctgacccaggccctggctcagtcgggacagcagctggagtggccagaggcctggcgccagcagcttgtggacaagcattccacagggggtgtgggtgacaaggtcagcctggtcctcgcacctgccctggcggcatgtggctgcaaggttataaaccacctcctttccagacgggagcctataccgcacatgcagcaaccagtccatccacaggcagctcccaacctcaagcctggcccaaagcctccaagaccctaccaaggcttctccccaccctgctccccagcacagttctccccaccccgttccccagcacagcgcttggggcccctctggctccagaccaggccccttggagcaggaaaaagatccactgatggaattcagacccctttccccttgggtccccagacagctcccccaagggaggagctgaggacttccctccctctgccccaagccttgtttccccaaggacaggtaccaacctcctcccctactgacacttctcaaccaagaaaacttcctttccattccctcaccagctgggcacccctatagctgcttaaatactttccaaatccagctgcactcctagccagggaaggtgaagggatgcacagaggtgggggaggggtactgtgcagggtactcagcatccctgaccaccaggtgccaatgatcagcggacgtggtctggggcacacaggaggcaccttggataagctggagtctattcctggattcaatgtcatccagagcccagagcaggtacggggcgccacggatcagtcattgatccaggttgatgatggagaccctggccagaatcactaaaagatcactggtggatcattagggtcactaatgagaacactggtcaaggttactcatgagtcactgggcctgggccgaaatcatcagtggaactttgattaggatcataaaatgggaagttggtcaaaatcacagatggctggcggggcacggtggctcacacctgtagtcctagcacttggggaggccgaagagggcagatcccttgaacccaggagttcaaaaccagcctggataacacggcaaaaccccatctctacaaaatagttcgctgcgtgtggtggtgcacgcatgtggttccagctactcaggaggctgaggcaggaggatcacttgagcctgggaggtctaggctgcagtgagccgggacgatgccactgcactccagcctgggcaacagagtgagaccctgtcccagcactctgggaggcagaggagcccagttggagatcagcctgggtaatatagtgaaacttgatctctacaaaaaaaaaa

SEQ ID NO: 536 - DNA, 704 bp, Homo sapiens
agagagccctgcgggaactgcgtgagcgcgtgacccatggcttggctgaagccggcagggaccgcgaggacgtcagcaccgagctgtaccgggcgctggaggccgtgaggctgcagaacagtgagggttcctgtgagccgtgccctacgtcgtggctgcccttcgggggctcctgctactatttctctgtgccgaagaccacgtgggcagaggcgcagggccactgcgccgatgccagcgcacatctggcgatgtagggggcctgggggagcaggacttcctgagtcgtgacactagtgcccttgaatactggatcggccgcagggccgtgcaacacctgcgcaaggttcagggctactcgtgggtggacggagtcccactcagcttcaggtaggggaagggctcctggtgaaacctgggggccacaggttagactctagaggacatgttttgaggccgaggtgggcggatcacctgaggtcaggagttcaagaccagcatgggaaacgtggcgaaaccccatctctactaaaaatacaaaaaattagccgggcgtggtggcacacgcctgtaatcccagctaaccctggatgctgaggcacgagaatcacttgaacccaggaggcagaggttgcagtgagccgagattgcgccactgcactccagcctgggagacagagttagactccgtctcaaaaaaaaaa

SEQ ID NO: 537 - DNA, 1058 bp, Homo sapiens
agatggccgcgctcctggccgcctagagccggagcggcccgcggagctgcggaggcagccatggtcggggcgctgtgcggctgctggttccgcctgggcggggcccgcccgctcatcccgttgggcccgactgtggtacagacctccatgagccggtcccaggtagccctgctgggcctgagtctgctgctcatgctcctactgtatgtggggctgccaggcccccctgagcagacttcctgcctctggggagaccccaatgtcacagtcctggctggtctcacccctggcaactcgcccatcttttaccgcgaggtgctcccactcaaccaggcacacagggtggaggtggtgctgcttcatggaaaggcctttaactctcacacgtgggagcagctgggcacactgcagctactgtcacagaggggctaccgggccgtggcccttgaccttccaggttttgggaactcggcaccttcaaaggaggcaagcacagaggcagggcgggcagcgctgctggagcgggcgctgcgggacctggaggtacagaatgccgtgttggtgagcccctcgctgagtggccactatgccctgcccttcctgatgcgaggccaccaccagctacatggatttgtgcccatcgcacccacctccacccagaactacacccaggagcaattctgggctgtgaagactccaacccttatcctgtatggagagctggaccacatcctggctcgagagtcactgcggcagctccgccacctgcccaaccactctgtggtgaagctacgcaatgcaggccatgcctgttacctccacaagccgcaagacttccaccttgtcctgcttgccttccttgaccatctaccttgaactaacccactcccagctcccagcctggcatgagcttggacagtctggaccgccaccctccctgaaccagggagacagcctctgggattggaggccagaggccagggtcagacccagccaggactcctcatttcatctcacagacacaataaaaaagcatatttgtcctgccaaaaaaaaaa

SEQ ID NO: 538 - DNA, 1895 bp, Homo sapiens
cccacgcgtccgccgccgccaccgtaaggctaggccgcgagcttagtcctgggagccgcctccgtcgccgccgtcagagccgccctatcagattatcttaacaagaaaaccaactggaaaaaaaaatgaaattccttatcttcgcatttttcggtggtgttcaccttttatccctgtgctctgggaaagctatatgcaagaatggcatctctaagaggacttttgaagaaataaaagaagaaatagccagctgtggagatgttgctaaagcaatcatcaacctagctgtttatggtaaagcccagaacagatcctatgagcgattggcacttctggttgatactgttggacccagactgagtggctccaagaacctagaaaaagccatccaaattatgtaccaaaacctgcagcaagatgggctggagaaagttcacctggagccagtgagaataccccactgggagaggggagaagaatcagctgtgatgctggagccaagaattcataagatagccatcctgggtcttggcagcagcattgggactcctccagaaggcattacagcagaagttctggtggtgacctctttcgatgaactgcagagaagggcctcagaagcaagagggaagattgttgtttataaccaaccttacatcaactactcaaggacggtgcaataccgaacgcagggggcggtggaagctgccaaggttggggctttggcatctctcattcgatccgtggcctccttctccatctacagtcctcacacaggtattcaggaataccaggatggcgtgcccaagattccaacagcctgtattacggtggaagatgcagaaatgatgtcaagaatggcttctcatgggatcaaaattgtcattcagctaaagatgggggcaaagacctacccagatactgattccttcaacactgtagcagagatcactgggagcaaatatccagaacaggttgtactggtcagtggacatctggacagctgggatgttgggcagggtgccatggatgatggcggtggagcctttatatcatgggaagcactctcacttattaaagatcttgggctgcgtccaaagaggactctgcggctggtgctctggactgcagaagaacaaggtggagttggtgccttccagtattatcagttacacaaggtaaatatttccaactacagtctggtgatggagtctgacgcaggaaccttcttacccactgggctgcaattcactggcagtgaaaaggccagggccatcatggaggaggttatgagcctgctgcagcccctcaatatcactcaggtcctgagccatggagaagggacagacatcaacttttggatccaagctggagtgcctggagccagtctacttgatgacttatacaagtatttcttcttccatcactcccacggagacaccatgactgtccatgggatccaaacgcagatgaatgtttgctgctgctgttttgggctgttgtttcttatgtgtgttgcagacatggaagaaatgctgcctaggtcctagaaacagtaagaaagaaaccgttttcatgcttctggcccaggaatccctgggtctgcaactttgggaaaacccctcttcacataaccattttcatcccaattcatcttcaaagcacaactctaatttcatgctttctcgttattatctttcttggatactttccaaattctctggattctaggaaaaagggaatcattctcccctcccctccccacccacatagaatcaacatatggtagggattacagtgggggcattttctttatatcacctcttaaaaacattgtttccactttaaaaagttaaacacttaataaatttttggaaataatctgaaaaaaaaaa

SEQ ID NO: 539 - DNA, 2730 bp, Homo sapiens
tttttttgttttttattttttctttttaagtttgattttttttatttcaaaatgctttgcaattaaatgaattactgttcagaagtctcccacttttcatacaaaaatactgtgctactgatacagttgaaaaaattcaatgatgtctctcctgcaggagaaattcacagcatccccagggtcaacatgaaatctggccctgtccccgccactgggggctccccaggcctgcgttcctgataaactgggacaggttttccaggcactgaccaactatccaccaagggtcctctgcctccaagacagaccctgaatcaatagcagcaactttcccatatttcatgtagggatatgtggagggggacaggaactctcccatttccccagctgggcctactacctgcctgccctgttcactctggtgccatgaggcaggttcagtgattgattggtcttgcctgctgcagaggacctggccagctccagaagggtcactcatcaggtcctgcaaaggtctgtatcattaatcagtgtcatcagtgtcctcagaagacactagcagagtccagggtgatgcgttcagccacaagcacaaagactgctttttctaaagagcaggatgaggtgaatgtgggaacggaaagcagttgtcacgaaggctgtgtggctctgctgggggagaggcatccacagtctgtgccaaggaggtacctcaccctgtgcagcaggagcgttaaggccaaaaaacaaaaggggccaacagaaaacagctcaggtgatggggggaggagcagcaagaaaaaacgacaaccgagaccaactgaaggttcggtcaggaatgcaggctcttccgtctatacagtgtttaaaaagatccaaatgtgactgagatcattccagcctgcactttttatttgtaggcagaaggaacgggataggttgaggggcatgacgggggctctcgccacctcttgtctgcacctctggaacaggtgggagccgaatcattcaagtcctacctggtcagactcccaaccacgctgaggcaggcccttaccttggattgcctcatgggcctccctcttgaaaagaccctcactctgtttggaaaagatcccttagcagccataatcaggaaagagactctagagcgagcccagggcttccccaaagcgggattttctgtcctgttttcagctggaaattgaagtccttgggggcctcgaagatgagcacgatggtggagcccaggttgaactcgcccaggtgctcgcccttacgcatggggacgccctctctattggtgtgcgtcacgaagctgaagtcattgtaggagcccttgctgtgccttgggctgtttgtgtgcaggtcccggtcaaagtagatgcgaatggagccccagttgggtggcccccacagctgtcagtgagaagaagccatgtttccagtcccccgtcaggaccacccgctcgttatggcagaagagctctttgatccagcgagccatgccagggttcactgacatcagggagcctgggaagtggcgccggtgggacacagtccagtcggtgggggagtggaagcagtggtagtccccaggggccaggtagatgacacagtgatagagctcattcccttcccgggtgaccagctggttcttgaaggagtcacacgacgcggctggtgggaagggcaggtcctctgtgcacatacgcgggcccaggaacgactccagggagtaggtgaccccctttacctgctccacctcacagttcttcacctgcccaaagttgaggatccttccatccgatgggctaatcacgctgtgcaggccacagacaggccgggcctgcggcttcagcttgcgccggaagaactcgctgaggttgcggtagtgatgcaggtcctccacagcggcctctttcatgttcaccccaaacgtccagatgtacaggctgtagacgggcctgcgcagccagtgtggcagctccacctgattgaggcgaccccaggcccgtgacagcaagcgcgttggcactgacttgtacaaagccaccctgcttacgggcctccatcccacccggctgagcggtctgagggcgccgaagggcaggaggtagtagaggacggtcaagggccaggagcgcagtttcagagcgggtctggacatgcagctcagctgccccagcctccgcctcagggccagctgggggaagtgcaaccatttcgccgcgcggagctctggtccttgccgcgcctctgactgacacatcatgggccggcgcagggagggcggggcgaggctcactcgatcactccctttgttttcctctttcctccccttcccccgagccagcagatctcctgtgctgtcactgctccagggcctctgcctctgcgaggctggttggtggcgccgcttcctgggtttggttcagtctcggtggctcacagggtgcagaatagagggtcagggccgcgcccggcaggagataagatgtggaggaagtgagctcacgcagcccgggccgtgcccacgtggggacggaaaaaaagcccacgactcgctcaaccttgtccgcggggctcctcaggccggggccgcgtcgtcacagctgggagagcccacctgcgaccgaaggccctagaagggcacccccacccggcactggccctctgagcgggcagggtggggcgcctccctgagaagtcacctggggctccacgaaa

SEQ ID NO: 540 - DNA, 3707 bp, Homo sapiens
ggctgcccgagcgagcgttcggacctcgcaccccgcgcgccccgcgccgccgccgccgccggcttttgttgtctccgcctcctcggccgccgccgcctctggaccgcgagccgcgcgcgccgggaccttggctctgcccttcgcgggcgggaactgcgcaggacccggccaggatccgagagaggcgcgggcgggtggccgggggcgccgccggccccgccatggagctccgggcccgaggctggtggctgctatgtgcggccgcagcgctggtcgcctgcgcccgcggggacccggccagcaagagccggagctgcggcgaggtccgccagatctacggagccaagggcttcagctcgagcgtacgtgccccaggcggagatctcgggtgagcacctgcggatctgtccccagggctacacctgctgcaccagcgagatggaggagaacctggccaaccgcagccatgccgagctggagaccgcgctccgggacagcagccgcgtcctgcaggccatgcttgccacccagctgcgcagcttcgatgaccacttccagcacctgctgaacgactcggagcggacgctgcaggccaccttccccggcgccttcggagagctgtacacgcagaacgcgagggccttccgggacctgtactcagagctgcgcctgtactaccgcggtgccaacctgcacctggaggagacgctggccgagttctgggcccgcctgctcgagcgcctcttcaagcagctgcacccccagctgctgctgcctgatgactacctggactgcctgggcaagcaggccgaggcgctgcggccctttcggggaggccccgagtagagctgcgcctgcgggccacccagtgccgttcgtggctgctcgcgtcctttgtgcagggcctgggcgtggccagccgacgtggtccggaaagtggctcaggtccccctgggccgcggagtgcttcgagagctgtaattgaagctgggtcttactgtggcttcactgcgtgggagtccccggcgccaggccatgccctgactattgccgaaatgtgctcaagggctgccttgccaaccaggccgacctggacgccgagtggaggaacctcctggactccatggtgctcatcaccgacaagttctggggtacatcgggtgtggagagtgtcatcggcagcgtgcacacgtggctggcggaggccatcaacgccctccaggacaacagggacacgctcacggccaaggtcatccagggctgcgggaaccccaaggtcaacccccagggccctgggcctgaggagaagcggcgccggggcaagctggccccgcgggagaggccaccttcaggcacgctggagaagctggtctccgaagccaaggcccagctccgcgacgtccaggacttctggatcagcctcccagggacactgtgcagtgagaagatggccctgagcactgccagtgatgaccgctgctggaacgggatggccagaggccggtacctccccgaggtcatgggtgacggcctggccaaccagatcaacaaccccgaggtggaggtggacatcaccaagccggacatgaccatccggcagcagatcatgcagctgaagatcatgaccaaccggctgcgcagcgcctacaacggcaacgacgtggacttccaggacgccagtgacgacggcagcggctcgggcagcggtgatggctgtctggatgacctctgcggccggaaggtcagcaggaagagctccagctcccggacgcccttgacccatgccctcccaggcctgtcagagcaggaaggacagaagacctcggctgccagctgcccccagcccccgaccttcctcctgcccctcctcctcttcctggcccttacagtagccaggccccggtggcggtaactgccccaaggccccagggacagaggccaaggactgactttgccaaaaatacaacacagacgatatttaattcacctcagcctggagaggcctggggtgggacagggagggccggcggctctgagcaggggcaggcgcagaggtcccagccccaggcctggcctcgcctgcctttctgccttttaattttgtatgaggtcctcaggtcagctgggagccagtgtgcccaaaagccatgtatttcagggacctcaggggcacctccggctgcctagccctccccccagctccctgcaccgccgcagaagcagcccctcgaggcctacagaggaggcctcaaagcaacccgctggagcccacagcgagcctgtgccttcctccccgcctcctcccactgggactcccagcagagcccaccagccagccctggcccaccccccagcctccagagaagccccgcacgggctgtctgggtgtccgccatccagggtctggcagagcctctgagatgatgcatgatgccctcccctcagcgcaggctgcagagcccggccccacctccctgcgcccttgaggggccccagcgtctgcagggtgacgcctgagacagcaccactgctgaggagtctgaggactgtcctcccacagacctgcagtgaggggccctccatgcgcagatgaggggccactgacccacctgcgcttctgctggaggaggggaagctgggcccaaaggcccagggaggcagcgtgggctctgccaatgtgggctgcccctcgcacacagggctcacagggcaggccttgctggggtccagggctgttggaggaccccgagggctgaggagcagccaggacccgcctgctcccatcctcacccagatcaggaaccagggcctccctgttcacggtgacacaggtcagggctcagagtgaccctcagctgtcacctgctcacagggatgctggtggctggtgagaccccgcactgcagacgggaatgcctaggtcccttcccgacccagccagctgcagggcacggggacctggatagttaagggcttttccaaacatgcatccatttactgacacttcctgtccttgttcatggagagctgttcgctcctcccagatggcttcggaggcccgcagggcccaccttggaccctggtgacctcctgtcactcactgaggccatcagggccctgccccaggcctggacgggccctccttccctcctgtgccccagctgccaggcggccctggggaggggtggtgtggtgttgggaaggggtcctgcagggggaggaggacttggagggtctgggggcagctgtcctgaaccgactgaccctgaggaggccgcttagtgctgctttgcttttcatcaccgtcccgcacagtggacggaggtccccggttgctggtcaggtccccatggcttgttctctggaacctgactttagatgttttgggatcaggagcccccaacacaggcaagtccaccccataataaccctgccagtgccagggtgggctggggactctggcacagtgatgccgggcgccaggacagcagcactcccgctgcacacagacggcctaggggtggcgctcagaccccaccctacgctcatctctggaaggggcagccctgagtggtcactggtcagggcagtggccaagcctgctgtgtccttcctccacaaggtccccccaccgctcagtgtcagcgggtgacgtgtgttcttttgagtccttgtatgaataaaaggctggaaacctaaaaaaaaaa

SEQ ID NO: 541 - DNA, 620 bp, Homo sapiens
ttttttttttttttggggagttgcaacaattcatctttatttcttattttcctctggagatgcagaatttggtatatttcaccccaggtatatttgggatagttggctcctcgctgggtcaggatggctgggtgccttctcccctggcatggttctcttctctgcagggcgaggggcagggagctagtaaaacctcgcaatgacagcccgcaatggcagacccaatggagcccaggatgaacttggtcaatccggagaagtccagttgctcccagtgactgcagaagtagccacaaaggctgccccggggaaactccacccccattgggcaatggccgccgcggacatcatcttggctgctatggaggacgaggcgattcccgcgcgcagttgaagccccatggcacttgagcaccatgggcacagcctgcatgggccaccaactcttcaatcacaacttgtagcaatcctggccaggggcaaaactacggcagagccagaggccacccctgaccactttggccacactggtcacttgctgatttagtgagagcagaggcctccatgcctgctcgggttaattccgtggcttagagagtaagagatcctcaacttcagct

SEQ ID NO: 542 - DNA, 2475 bp, Homo sapiens
  misc_feature (1)...(2475): n = a,t,c or g
agagggagggaacgatttaaggagcgaatactactggtaaactaatggaagaaatctgctgcaccactggatattgggagtgtgtggcatgcatcctcatcatcaggaaactctaaaaaagaaccgagtggtgctagccaaacagctgttgttgagcgaattgttagaacatcttctggagaaggacatcatcaccttggaaatgagggagctcatccaggccaaagtgggcagtttcagccagaatgtggaactcctcaacttgctgcctaagaggggtccccaagcttttgatgccttctgtgaagcactgagggagaccaagcaaggccacctggaggatatgttgctcaccaccctttctgggcttcagcatgtactcccaccgttgagctgtgactacgacttgagtctcccttttccggtgtgtgagtcctgtcccctttacaagaagctccgcctgtcgacagatactgtggaacactccctagacaataaagatggtcctgtctgccttcaggtgaagccttgcactcctgaattttatcaaacacacttccagctggcatataggttgcagtctcggcctcgtggcctagcactggtgttgagcaatgtgcacttcactggagagaaagaactggaatttcgctctggaggggatgtggaccacagtactctagtcaccctcttcaagcttttgggctatgacgtccatgttctatgtgaccagactgcacaggaaatgcaagagaaactgcagaattttgcacagttacctgcacaccgagtcacggactcctgcatcgtggcactcctctcgcatggtgtggagggcgccatctatggtgtggatgggaaactgctccagctccaagaggtttttcagctctttgacaacgccaactgcccaagcctacagaacaaaccaaaaatgttcttcatccaggcctgccgtggaggtgctattggatcccttgggcacctccttctgttcactgctgccaccgcctctcttgctctatgagactgatcgtggggttgaccaacaagatggaaagaaccacgcaggatcccctgggtgcgaggagagtgatgccggtaaagaaaagttgccgaagatgagactgcccacgcgctcagacatgatatgcggctatgcctgcctcaaagggactgccgccatgcggaacaccaaacgaggttcctggtacatcgaggctcttgctcaagtgttttctgagcgggcttgtgatatgcacgtggccgacatgctggttaaggtgaacgcacttatcaaggatcgggaaggttatgctcctggcacagaattccaccggtgcaaggagatgtctgaatactgcagcactctgtgccgccacctctacctgttcccaggacaccctcccacatgatgtcacctccccatcatccacgccaagtggaagccactggaccacaggaggtgtgatagagcctttgatcttcaggatgcacggtttctgttctgccccctcagggatgtgggaatctcccagacttgtttcctgtgcccatcatctctgccttggagtgtgggactccaggccagctccttttctgtgaagccctttgcctgtagagccagccttggttggacctattgccaggaatgtttcagctgcagttgaagagcctgacaagtgaagttgtaaacacagtgtggttatggggagagggcatataaattccccatatttgtgttcagttccagcttttgtagatggcactttagtgattgcttttattacattagttaagatgtcttgagagaccatctcctatcttttatttcattcatatcctccgccctttttgtcctagagtgagagtttggaaggtgtccaaatttaatgtagacattatcttttggctctgaagaagcaaacatgactagagacgcaccttgctgcagtgtccagaagcggcctgtgcgttcccttcagtactgcagcgccacccagtggaaggacactcttggctcgtttgggctcaaggcaccgcagcctgtcagccaacattgccttgcatttgtaccttattgatctttgcccatggaagtctcaaagatctttcgttggttgtttctctgagctttgttactgaaatgagcctcgtggggagcatcagagaaggccaggaagaatggtgtgtttccctagactctgtaaccacctctctgtctttttccttcctgagaaacgtccatctctctcccttactattcccactttcattcaatcaacctgcacttcatatctagatttctagaaaagcttcctagcttatctccctgcttcatatctctcccttctttaccttcatttcatcctgttggctgctgccaccaaatctgtctagaatcctgctttacaggatcatgtaaatgctcaaagatgtaatgtagntctttgttcctgctttctctttcagtat

SEQ ID NO: 543 - DNA, 862 bp, Homo sapiens
gttttttttgtggaccccactcaaaacgtatttattgaatgacaatttcttagtacagtgtatactatccccaccaaaggaaaaaaacattaagagcaaaacaaggggtggggggtgggaatattgctaaagaaaattctaataagagttatctataattatagcttttatttattatatcttcattcaatcatttatatcacaattagtctaattgcattcttgatgaataactgacttcagcaaaggagtcaatccactaagcaaagttcatatatatttttcaagatgttcttctttcgatcttgagtctttactctcctggattcccaagagaactgcattagcctctagtacagttgtaatctgttgttgctcccaggaacctagacgtaagttcaagatctaatagccgcaaaccggaccctggttcctttctgggtatttctctccatccacttctggtcttctacatacacaatgaaactttccaccaaaatctatgtaccagatcattctccacaatatgaaagatccgtccaatgaccagtttatcctttgcaggtcccatctgtgtaagaggagaatgtctcagcatagatgcaaaggattccacattttttggagaacccttctgtaggggctccaccttctgtagaagctccgagtgccgctccaacgcgctcgcgaaaccgcctgcgcgcgtcttaggctccttggcattggaactaccactttcggatccactctcagtgcctacaccccgaaagggcctgaagaagagaaacactcgcagaaaatggctctcggcagccacagcacgggtccgacacagcgccgccatgacttctttacctctgac

SEQ ID NO: 544 - DNA, 5656 bp, Homo sapiens
aattccgggcgccagtcccgctccgcgccgcgccgctccgctccggctcgggctccggctcgcctcgggctgggctcgggctccggggggggtgtcccccgtgccgggtcccggtatgggtggggacgctccaaccatggcccgtgcccaggcgctcgtgttggaactcaccttccagctctgcgcgccggagaccgagactccggaagttggttgcaccttcgaggagggaagtgacccagcagtgccctgcgagtacagccaggcccagtacgatgacttccagtgggagcaagtgcgaatccaccctggcacccgggcacctgcggacctgccccacggctcctacttgatggtcaacacttcccagcatgccccaggccagcgagcccatgtcatcttccagagcctgagcgagaatgatacccactgtgtgcagttcagctacttcctgtacagccgggacgggcacagcccgggcaccctgggcgtctacgtgcgcgttaatgggggccccctgggcagtgctgtgtggaatatgactggatcccacggccgtcagtggcaccaggctgagctggctgtcagcactttctggcccaatgaatatcaggtgctgtttgaggccctcatctccccagaccgcaggggctacatgggcctagatgacatcctgcttctcagctacccctgcgcaaaggccccacacttctcccgcctgggcgacgtggaggtcaacgcgggccagaacgcgtcgttccagtgcatggccgcgggcagagcggccgaggccgaacgcttcctcttgcaacggcagagcggggcgctggtgccggcggcgggcgtgcggcacatcagccaccggcgcttcctggccactttcccgctggctgccgtgagccgcgccgagcaggacctgtaccgctgtgtgtcccaggccccgcgcggacgcgggacgtctctcaacttcgcggagtttatggtcaagagcccccaactcccatcgcgcccccacagctgctgcgtgctggccccacctacctcatcatccagctcaacaccaactccatcattggcgacgggccgatcgtgcgcaaggagattgagtaccgcatggcgcgcgggccctgggctgaggtgcacgccgtcagcctgcagacctacaagctgtggcacctcgaccccgacacagagtatgagatcagcgtgctgctcacgcgtcccggagacggcggcactggccgccctgggccacccctcatcagccgcaccaaatgcgcagagcccatgagggcccccaaaggcctggcttttgctgagatccaggcccgtcagctgaccctgcagtgggaaccactgggctacaacgtgacgcgttgccacacctatactgtgtcgctgtgctatcactacaccctgggcagcagccacaaccagaccataccgagagtgtgtgaagacagagcaaggtgtcagccgctacaccatgaagaacctgctgccctatcggaacgttcacgtgaggcttgtcctcactaaccctgaggggcgcaaagagggcaaggaggtcactttccagacggatgaggatgtgcccagtgggattgcagccgagtccctgaccttcactccactggaggacatgatcttcctcaagtgggaggagccccaggagcccaatggtctcatcacccagtatgagatcagctaccagagcatcgagtcatcagacccggcagtgaacgtgccaggcccacgacgtaccatctccaagctccgcaatgagacctaccatgtcttctccaacctgcacccaggcaccacctacctgttctccgtgcgggcccgcacaggcaaaggcttcggccaggcggcactcactgagataaccactaacatctctgctcccagctttgattatgccgacatgccgtcacccctgggcgagtctgagaacaccatcaccgtgctgctgaggccggcacagggccgcggtgcgcccatcagtgtgtaccaggtgattgtggaggaggagcagggcagcaggaggctgcggcgggagccaggtggacaggactgcttcccagtgccattgaccttcgaggcggcgctggcccgagggctggtggactacttcggggccgaactggcggccagcagtctacctgaggccatgccctttaccgtgggtgacaacaagacctaccgaggcttctggaacccaccacttgagcctaggaaggcctatctcatctacttccaggcagcaagccacctgaagggggagacccggctgaattgcatccgcattgccaggaaagctgcctgcaaggaaagcaagcggcccctggaggtgtcccagagatcggaggagatggggcttatcctgggcatctgtgcaggggggcttgctgtcctcatccttctcctgggtgccatcattgtcatcatccgcaaagggagagaccactatgcctactcctactacccgaagccggtgaacatgaccaaggccaccgtcaactaccgccaggagaagacacacatgatgagcgccgtggaccgcagcttcacagaccagagcaccctgcaggaggacgagcggctgggcctgtccttcatggacacccatggctacagcacccggggagaccagcgcagcggtggggtcactgaggccagcagcctcctggggggctccccgaggcgtccctgtggccggaagggctccccataccacacggggcagctgcaccctgcggtgcgtgtcgcagaccttctgcagcacatcaaccagatgaagacggccgagggttacggcttcaagcaggagtatgagagcttctttgaaggctgggacgccacaaagaagaaagacaaggtcaagggcagccggcaggagccaatgcctgcctatgatcggcaccgagtgaaactgcacccgatgctgggagaccccaatgccgactacattaatgccaactacatagatattcggataaaccgagaaggttaccacaggtcaaaccacttcatagccactcaagggccgaagcctgagatggtctatgacttctggcgtatggtgtggcaggagcactgttccagcatcgtcatgatcaccaagctggtcgaggtgggcagggtgaaatgctcacggtactggccggaggactcagacacctacggggacatcaagattatgctggtgaagacagagaccctggctgagtatgtcgtgcgcacttttgccctggagcggagaggctactctgcccggcacgaggtccgccagttccacttcacagcgtggccagagcatggcgtcccctaccatgccacggggctgctggctttcatccggcgcgtgaaggcttccaccccacctgatgccgggcccattgtcatccactgcagcgcgggcaccggccgcacaggttgctatatcgtcctggatgtgatgctggacatggcagagtgtgagggcgtcgtggacatttacaactgtgtgaagactctctgctcccggcgtgtcaacatgatccagactgaggagcagtacatcttcattcatgatgcaatcctggaggcctgcctgtgtggggagaccaccatccctgtcagtgagttcaaggccacctacaaggagatgatccgcattgatcctcagagtaattcctcccagctgcgggaagagttccagacgctgaactcggtcaccccgccgctggacgtggaggagtgcagcatcgccctgttgccccggaaccgcgacaagaaccgcagcatggacgtcctgccgcccgaccgctgcctgcccttcctcatctccactgatggggactccaacaactacattaatgcagccctgactgacagctacacacggagtgcggccttcatcgtgaccctgcacccgctgcagagcaccacgcccgacttctgggggctggtctacgattacgggtgcacctccatcgtcatgctcaaccagctgaaccagtccaactccgcctggccctgcctgcagtactggccagagccaggccggcagcaatatggcctcatggaggtggagtttatgtcgggcacagctgatgaagacttagtggctcgagtcttccgggtgcagaacatctctcggttgcaggaggggcacctgctggtgcggcacttccagttcctgcgctggtctgcataccgggacacacctgactccaagaaggccttcttgcacctgctggctgagggggacaagtggcaggccgagagtggggatgggcgcaccatcgtgcactgcctaaacgggggaggacgcagcggcaccttctgcgccctgcgccacggtcctggagatgatccgctgccacaacttggtggacgttttctttgctgccaaaaccctccggaactacaaacccaacatggtggagaccatggatcagtaccacttttgctacgatgtggccctggagtacttggaggggctggagtcaagatagcggggccctggcctggggcacccactgcacactcagggccagacccaccatcctggactggcgaggaagatcagtgcctcctgctctgcccaaacacactcccatggggcaagcactggagtggatgctgggctatcttgctcccccttccactgtgggcagggcctttcgcttgtcccatgggcgggtggtgggccaaggaggagcttagcaagtctgcagcccagccccacctccatagggtcctgcaggcctgtgctgagaggcctggtgctgcctggcagagtgacaaaggctcaggacggctggctctgggggactcaggccaagccccttggcaccatcctggcttttggcagggatgagtgaggccctgcagagagcatcccaggccaaggttcccactcagcctgccccctctgcatgtgggtagaggatgtactgggacttggcatttaggattccatctggcccagcccctgaaggtcctggggaagcaggtctcaattctgaatagccagtggggcacactgactgtccctccccaggggaactgcagcgcccctcctccccactgccccctgcaaccccctgagatattttgctcactatcccctcccccacttgcttccctgatatgtgctctgagcttccctgaaccaggatctgcctattactgctgtgccccatggggggctccttccctgcctgacccactgttgcagaatgaagtcacctcgcccccctcttcctttaatcttcaggcctcactggcctgtcctgctcagcttgggccagtgacaatctgcaaggctgaacaacagcccctggggttgaggcccctgtggctcctggtcaggctgcccgttgtggggaggggcagtgttagagcagggctggtcataccctctggagttcagaggaagaggtaggaccagtgcttttttgtttcttttgttatttttggttgggtgggtgggaaggtctctttaaaatggggcaggccacacccccattccgtgcctcaatttccccatctgtaaactgtagatatgactactgacctacctcgcagggggctgtggggaggcataagctgatgtttgtaaagcgctttgtaaataaacgtgctctctgaatgcctaaaaaaaaaa

SEQ ID NO: 545 - DNA, 2735 bp, Homo sapiens
tttttttgttttttattttttctttttaagtttgattttttttatttcaaaatgctttgcaattaaatgaattactgttcagaagtctcccacttttcatacaaaaatactgtgctactgatacagttgaaaaaattcaatgatgtctctcctgcaggagaaattcacagcatccccagggtcaacatgaaatctggccctgtccccgccactgggggctccccaggcctgcgttcctgataaactgggacaggttttccaggcactgaccaactatccaccaagggtcctctgcctccaagacagaccctgaatcaatagcagcaactttcccatatttcatgtagggatatgtggagggggacaggaactctcccatttccccagctgggcctactacctgcctgccctgttcactctggtgccatgaggcaggttcagtgattgattggtcttgcctgctgcagaggacctggccagctccagaagggtcactcatcaggtcctgcaaaggtctgtatcattaatcagtgtcatcagtgtcctcagaagacactagcagagtccagggtgatgcgttcagccacaagcacaaagactgctttttctaaagagcaggatgaggtgaatgtgggaacggaaagcagttgtcacgaaggctgtgtggctctgctgggggagaggcatccacagtctgtgccaaggaggtacctcaccctgtgcagcaggagcgttaaggccaaaaaacaaaaggggccaacagaaaacagctcaggtgatggggggaggagcagcaagaaaaaacgacaaccgagaccaactgaaggttcggtcaggaatgcaggctcttccgtctatacagtgtttaaaaagatccaaatgtgactgagatcattccagcctgcactttttatttgtaggcagaaggaacgggataggttgaggggcatgacgggggctctcgccacctcttgtctgcacctctggaacaggtgggagccgaatcattcaagtcctacctggtcagactcccaaccacgctgaggcaggcccttaccttggattgcctcatgggcctccctcttgaaaaagaccctcactctgtttggaaaagatcccttagcagccataatcaggaaagagactctagagcgagcccagggcttccccaaagcggattttctgtcctgttttcagctggaaattgaagtccttgggggcctcgaagatgagcacgatggtggagcccaggttgaaactcgccccaggtgctcgccccttaacgccatggggacgccctctctattggtgtgcgtcacgaagctgaagtcattgtaggagcccttgctgtgccttgggctgtttgtgtgcaggtcccggtcaaagtagatgcgaatggagccccagttgggtggcccccacagctgtcagtgagaagaagccatgtttccagtcccccgtcaggaccacccgctcgttatggcagaagagctctttgatccagcgagccatgccagggttcactgacatcagggagcctgggaagtggcgccggtgggacacagtccagtcggtgggggagtggaagcagtggtagtccccaggggccaggtagatgacacagtgatagagctcattcccttcccgggtgaccagctggttcttgaaggagtcacacgacgcggctggtgggaagggcaggtcctctgtgcacatacgcgggcccaggaacgactccagggagtaggtgaccccctttacctgctccacctcacagttcttcacctgcccaaagttgaggatccttccatccgatgggctaatcacgctgtgcaggccacagacaggccgggcctgcggcttcagcttgcgccggaagaactcgctgaggttgcggtagtgatgcaggtcctccacagcggcctctttcatgttcaccccaaacgtccagatgtacaggctgtagacgggcctgcgcagccagtgtggcagctccacctgattgaggcgaccccaggcccgtgacagcaagcgcgttggcactgacttgtacaaagccaccctgcttacgggcctccatcccacccggctgagcggtctgagggcgccgaagggcaggaggtagtagaggacggtcaagggccaggagcgcagtttcagagcgggtctggacatgcagctcagctgccccagcctccgcctcagggccagctgggggaagtgcaaccatttcgccgcgcggagctctggtccttgccgcgcctctgactgacacatcatgggccggcgcagggagggcggggcgaggctcactcgatcactccctttgttttcctctttcctccccttcccccgagccagcagatctcctgtgctgtcactgctccagggcctctgcctctgcgaggctggttggtggcgccgcttcctgggtttggttcagtctcggtggctcacagggtgcagaatagagggtcagggccgcgcccggcaggagataagatgtggaggaagtgagctcacgcagcccgggccgtgcccacgtggggacggaaaaaaagcccacgactcgctcaaccttgtccgcggggctcctcaggccggggccgcgtcgtcacagctgggagagcccacctgcgaccgaaggccctagaagggcacccccacccggcactggccctctgagcgggcagggtggggcgcctccctgagaagtcacctggggctccacgaaa

SEQ ID NO: 546 - DNA, 4146 bp, Homo sapiens
  misc_feature (1)...(4146): n = a,t,c or g
gagacatggcccgggcagtggctcctggaagaggaacaagtgtgggaaaagggagaggaagccggagctaaatgacaggatgcaggcgacttgagacacaaaaagagaagcgttcctctcggatccaggcattgcctcgctgctttcttttctccaagacgggctgaggattgtacagctctaggcggagttggggctcttcggatcgcttagattctcctctttgctgcatttccccccacgtcctcgttctcccgcgtctgcctgcggacccggagaagggagaatggagagggggctgccgctcctctgcgccgtgctcgccctcgtcctcgccccggccggtgcttttcgcaacgataaatgtggcgatactataaaaattgaaagccccgggtaccttacatctcctggttatcctcattcttatcacccaagtgaaaaatgcgaatggctgattcaggctccggacccataccagagaattatgatcaacttcaaccctcacttcgatttggaggacagagactgcaagtatgactacgtggaagtcttcgatggagaaaatgaaaatggacattttaggggaaagttctgtggaaagatagcccctcctcctgttgtgtcttcagggccatttctttttatcaaatttgtctctgactacgaaacacatggtgcaggattttccatacgttatgaaattttcaagagaggtcctgaatgttcccagaactacacaacacctagtggagtgataaagtcccccggattccctgaaaaatatcccaacagccttgaatgcacttatatttgtctttgcgccaaagatgtcagagattatcctgggattttgaaagctttgacctggagcctgactcaaatcctccaggggggatgttctgtcgctacgaccggctagaaatctgggatggattccctgatgttggccctcacattgggcgttactgtggacagaaaacaccaggtcgaatccgatcctcatcgggcattctctccatggttttttacaccgacagcgcgatagcaaaagaaggtttctcagcaaactacagtgtcttgcagagcagtgtctcagaagatttcaaatgtatggaagctctgggcatggaatcaggagaaattcattctgaccagatcacagcttcttcccagtatagcaccaactggtctgcagagcgctcccgcctgaactaccctgagaatgggtggactcccggagaggattcctaccgagagtggatacaggtagacttgggccttctgcgctttgtcacggctgtcgggacacagggcgccatttcaaaagaaaccaagaagaaatattatgtcaagacttacaagatcgacgttagctccaacggggaagactggatcaccataaaagaaggaaacaaacctgttctctttcagggaaacaccaaccccacagatgttgtggttgcagtattccccaaaccactgataactcgatttgtccgaatcaagcctgcaacttgggaaactggcatatctatgagatttgaagtatacggttgcaagataacagattatccttgctctggaatgttgggtatggtgtctggacttatttctgactcccagatcacatcatccaaccaaggggacagaaactggatgcctgaaaacatccgcctggtaaccagtcgctctggctgggcacttccacccgcacctcattcctacatcaatgagtggctccaaatagacctgggggaggagaagatcgtgaggggcatcatcattcagggtgggaagcaccgagagaacaaggtgttcatgaggaagttcaagatcgggtacagcaacaacggctcggactggaagatgatcatggatgacagcaaacgcaaggcgaagtcttttgagggcaacaacaactatgatacacctgagctgcggacttttccagctctctccacgcgattcatcaggatctaccccgagagagccactcatggcggactggggctcagaatggagctgctgggctgtgaagtggaagcccctacagctggaccgaccactcccaacgggaacttggtggatgaatgtgatgacgaccaggccaactgccacagtggaacaggtgatgacttccagctcacaggtggcaccactgtgctggccacagaaaagcccacggtcatagacagcaccatacaatcagagtttccaacatatggttttaactgtgaatttggctggggctctcacaagaccttctgccactgggaacatgacaatcacgtgcagctcaagtggagtgtgttgaccagcaagacgggacccattcaggatcacacaggagatggcaacttcatctattcccaagctgacgaaaatcagaagggcaaagtggctcgcctggtgagccctgtggtttattcccagaactctgcccactgcatgaccttctggtatcacatgtctgggtcccacgtcggcacactcagggtcaaactgcgctaccagaagccagaggagtacgatcagctggtctggatggccattggacaccaaggtgaccactggaaggaagggcgtgtcttgctccacaagtctctgaaactttatcaggtgattttcgagggcgaaatcggaaaaggaaaccttggtgggattgctgtggatgacattagtattaataaccacatttcacaagaagattgtgcaaaaccagcagacctggataaaaagaacccagaaattaaaattgatgaaacagggagcacgccaggatacgaaggtgaaggagaaggtgacaagaacatctccaggaagccaggcaatgtgttgaagaccttagaacccatcctcatcaccatcatagccatgagcgccctgggggtcctcctgggggctgtctgtggggtcgtgctgtactgtgcctgttggcataatgggatgtcagaaagaaacttgtctgccctggagaactataactttgaacttgtggatggtgtgaagttgaaaaaagacaaactgaatacacagagtacttattcggaggcatgaaggcagacagagatgaaaagacagtcaaaggacggaagtggaaggacgggagtgagctggggagctgttgatctttcactatacaggctgggaagtgtgttgatgaccactgagccaggcttttctcaggagcttcaatgagtatggccgacagacatggacaaggagctgtgttcaccatcggactcatgtgcagtcagcttttttcctgttggtttcatttgaataatcagatgctggtgttgagaccaagtatgattgacataatcattcatttcgacccctcctgcccctctctctctctctcctctcccctttgtggattctttttggaaactgagcgaaatccaagatgctggcaccaagcgtattccgtgtggccctttggatggacatgctacctgaaacccagtgcccagaatatactagaatcaccgcatttcagtggactcctgaagttgtacttgtgtataattgcccgcgtcgtgcataggcaaagaaggattaggctgttttctttttaaagtactgtagcctcagtactggtgtagtgtgtcagctctgtttacgaagcaatactgtccagttttcttgctgtttttccggtgttgtactaaacctcgtgcttgtgaactccatacagaaaacggtgccatccctgaacacggctggccactgggtatactgctgacaaccgcaacaacaaaaacacaaatccttggcactggctagtctatgtcctctcaagtgcctttttgtttgtactggttcattgtgttacattaacgacccactctgcttcttgctggtgaaagccctgctctttaatcaaactctggtggcccactgactaagaagaaagtttattttcgtgtgagatgccagcccctccgggcaggcaagggctctgaagatttgggcaacgtgggcttaaattgttctgctttttctgtagttcaatttcatgtttcttgnaccctttttgtataaagctgcaatattctctcttattgttcntttcatatggaatgtaatttctcgtgccgaattcctgcaggcnaatcaattaaaatccccccggcgccc

SEQ ID NO: 547 - DNA, 1348 bp, Homo sapiens
ggcacgagggcagtgccctcacctgggccagccactaccaggagagactgaactccgaacagagctgcctcaatgagtggacggctatggccgacctggagtctctgcggcctcccagcgccgagcctggcgggtcagtgtgtggaggggagggactgggtggaggggaaggcaggataatgcagtggggggcatggtggagaggggaaagggccccttgactgaggggctctgctcccaggtcctcagaacaggagcagatggagcaggcgatccgtgctgagctgtggaaagtgttggatgtcagtgacctggagagtgtcacttccaaagagatccgccaggctctggagctgcgcctggggctccccctccagcagtaccgtgacttcatcgacaaccagatgctgctgctggtggcacagcgggaccgagcctcccgcatcttcccccacctctacctgggctcagagtggaacgcagcaaacctggaggagctgcagaggaacaggtagggctatgagcccctcgggccacccaccccatcttcccttctcctggcctccccgcattgggtggtagccagcttcaaaaacccctggaccaccctcagcagctgctagctctgcttctaactctgtcctggggctgttgccctggtgtgggctcccaggtggggacaggagacctgctggccagcccccgcccactctcctcccccatccacactgtgaaacaaggacagaaacaaagggcctcagccacgccaagacgagaagcagcagcgcatactgctgtaactgccttggacaagcagaaaaaggctcctcttgaatgcgcctgtgggcccagctacttgggaggctgaggcaggaggatcgcttgagccctggagattgaggccgcagtgagccgtgatcacgccactgcactccagcctgggcaacagagagagaccctgtctctaaaaaataagaaaaaagaaagagagaaaaagccttttctccaccttgccctgtctcagggaagaaggaactgcccttctccccgtggggacctggctgcctgctctgacaggtacctgtcatctgcccaccatgggcttctgggacctgctgtagcccctgccacccactgctgcagacccacccactctcagcttagctcaaaagctgttctctaactcatttctgagaataactgaagggctggagttgcagttggcccagctgtctggaccagatggggaaacaagcccagcagggcaagatgattggtctaaggtcgcagccaggtgacagctgggtcacttctcctcccactgtcactgctgcctccatctgacttg

SEQ ID NO: 548 - DNA, 1864 bp, Homo sapiens
  misc_feature (1)...(1864): n = a,t,c or g
tttttttttttttaaaacaatgtggtactggtgtattgacagtaatgtccacgaaacagaatgaaaacccccaaattacattaggtttacactgggagttagcaaaacaaaagggcagcattaaccgacatacagcacgtgggaggatggtggaaaagctggacatgactcactggacatttcaactgaaaccacagaggttcttgaaaatgctggagaattccctgattgccttatcagttacaaacccaaattcagaatcatgtgacagctggatacattcaactgtacgtacaaataatgatcaaaaaacacaaaagttgggtagtggttaccatagcttttactgtagttattcattaagctattcaactgttctgtgcagtttgatgttttattttacaataaaaagtcaaaaaaaataagcaaaaagataaactggaaaataagacttacatctcatatatatggacaaaggaccaattacctccaaacataaacagctcctagaaattactgcaaagatcaacaacccagtagaaaaatgaatgaagttcccagaacagaaaacacaagtggcccttcaaaaaaatgaagagaggctcagcctcttatggtaagacaaagagacaggattttaaaaacctaggcctcttcctagagttcccttaaatatctaggccagatcatttttacttcctggcttagaccctgccaagggctgcccagctactcaggtgtttgtgtccttgtggactcaagtcatattgtcctgatcttttggctgagtacggttttctcctccagcaaagacaatttggaggatgtactaagcatgaagcgctacttcctggcccccatctctcttcgcacagtgttccatcatccagccatgaaagcacagctgagtgatccaagaggcagttccaattgttgactaacgtgtacctgcctatgtgagtgtgtcctatgggaactcaggccttagaatggtttcaaagtagtggctttcaaaattactgtttgcctcttcaaacttcacacctaaggaaaatggaaacatgcagagcagggacacagaaggggcattagctggcgtggggtaggggcaagagctaattgtgaaggaagaaggcctgagatcacgtagccatgtcggagaacagctgtgctcgctgccctgcctctttgcgcgcatgtcaggcagccccaggctccagctgcttgagtttctcttggagtccccggagctggcttcgaccccagtcaatgcggttctggaggctggctatgtctgcggccagctgcaggccatcccggaagcttgcttgagcctgacgtagactgtgaggaactaggattccaaaccagttcagggggtcctgaggggcctcagaggactccggttctggggtcttagtggggcccttgcgcctccgcagacctgcttcgcgaggccccacctcctctggggcgtggacaccagctctcaccaccttgaacttctggagtccctcctgggcctcgctggcgtggaggcagacctggggctccatgtgggaagcatactgcaggggccctaccgacttggcgcccatcgcgtagcgagccttggcgagcgagagccagccctcctccacccgggcgttcaacaccgttcgtttcccctccagctcctccaggtccccaagcagctgcaggaccagcgaatccagctccgctcgcaggtcaagcgccgccatggacacacctccagatctggagccaccttcttccttgtcaccctccgcagtttggcaggacanccaataggcacacgagatcctccatcaaggggcgttcccagtctggggatccccanggc

SEQ ID NO: 549 - DNA, 649 bp, Homo sapiens
cattctgatgttggagcggccacagctgtcttgcccctcctcacggccgtgttgggtgttaccgtggtcacccgcagggacacggaggggccaggcagagcagccctagttcacctcaccgggagcccccgccagaaggtgggcacctctgggagggagggactgccaggccttggggcttcctgtgctgagtcagagctggaacgggagacgcaggagccccgcagccgcgggaggtgcatatttggggctgccaggtggcgccaggtccccttggccagcccccagcgcccctttcttctgtccccagggcctcggcttcacaggatggggctgccagtgtcctgggcccctcctgccctctgggttctagggtgctgcgccctgctcctctcgctgtgggcgctgtgcacagcctgccgcaggcccgaggacgctgtagcccccaggaagagggcgcggaggcagcgggcgaggctgcagggcagtgcgacggcggcggaagcggtgagtgccaagctgtcccggggaccagggtggggtccgcaggggaccgaccagccttcctcgcccccagtccctactgaagcggacccacctctgctccctcagcaagtcggacaccagactgcacgagctgcaccagggc

SEQ ID NO: 550 - DNA, 696 bp, Homo sapiens
ttttttttttttaaaggtttgcatgtttatttataattacaatttacattactccaacagaggagcccccttgctatgttctaattcttagccattaagtcctacaaaaataaacccaagcttttacagtaacttaatcaatacagaactaaagcctttatagctattagaggggtttagttaccaaggtgcttattttcgacaaaatgccctgtcactcagaggacgcatgcgtatactaaagttctgacccatcgactcatgcaacaaatgtagaccccaccctccctccacccactgttacaacacaaacacaaaacaacgatgtacaacagaggggaaatatgctcttggtcaactgaccttgcagaaaagactggcttgtttccaagtggatgagaacgccagtgtgtggccagagtccagcaatgactgaccggcccaggtcagaggctggcagggaccacagaagggccaaggcgctgccggggctcatcccaggctccaaccccaacctggaagcttgtggacaccaggctctgtgcagcagctccgtggctagcgtccagggcccctggccactactcccaaatgcttctagtccacccacccctggccagccccaaccttgacatcactgtggatgccatcagggtggtctggttcacttatacaacatgatccatgggctcgtgc

SEQ ID NO: 551 - DNA, 1037 bp, Homo sapiens
  misc_feature (1)...(1037): n = a,t,c or g
taaaaagtgaggatcttttcctttcttgtaagttagaagaaataacctcttcagttaaaccttcagtgaaggttcttttagttttctgttctgctttctaaaaacatagactctgttctttagagcaacttatgactctcatctctgctgcacgagaatatgagatagagttcatctatgcgatctcacctggattggatatcactttttctaaccccaaggaagtatccacattgaaacgtaaattggaccaggtttctcagtttgggtgcagatcatttgctttgctttttgatgatatagaccataatatgtgtgcagcagacaaagaggtattcagttcttttgctcatgcccaagtctccatcacaaatgaaatctatcagtacctaggagagccagaaactttcctcttctgtcccacaggtattgtatataatggctttacatttaactagtcttcttggaatatataacttataaaggaccatgggccccattctctctccacttccctcctcctttggtgtgtaaaagtaggaatctttttttagaagacatttttcaagatcctaaattggagaaattttaggaactaataaatgacaactgactaggcaaaagatttttatgtatttttaagtactggaagtatatgaacattacattgtcaatattaaaagagggatagtattgaaatgaaaactggagaaaaaccaaattacattgcttttaccttagtcacttctcatttcctcctacttgtcccctttttctgcccatgcatatctgtccctttttgcactcctcccactcccatctgggctcttatttcaagtagtcagcatagaaagcttaacagtttttcccgttttcctttctttntgcccctctggtttctttcattgaaaatattttagtctcttagttgcttctcaaaattcaacttacaggaagttttccccacacttcctttgtcaggaagaattttagattaaattatttaactttctttgtgtgtatgtgagccgagaacc

SEQ ID NO: 552 - DNA, 813 bp, Homo sapiens
gccagtggggcagcaaaggccccttggggtaacaaaggtgggatgtggaaggccaggggagcccgggggcgagagtgggggcagatggaggctcgggaagatcagtattgaggaccatgtaggggggagggggccgggaagggacctggctggggaatgagaaaacctggggccatcgtcaacccagagacttgggtttgcaggtgaagggtatcgggccgtccatccctctagcatgcttctcacgacttgcatctttacccactagacttctgcactgacccaggggctggagcgaatcccagaccagctcggctacctggtactgagtgaaggtgcagtgctggcgtcatctggggacctggagaatgatgagcaggcagccagtgccatctctgagctggtcagcacagcctgcggtttccggctgcaccgcggcatgaatgtgcccttcaagcgcctgtctgtggtctttggagaacacacactgctggtgacggtgtcaggacagagggtgtttgtggtgaagaggcagaaccgaggtcgggagcccattgatgtctgagcctgccggagggcgagggtcggagaagcggattgggtcctgggcctctgtgatgaggcaggcacacctgtcggtcttggcttgctgctagaactagggccttctgctcgcccacctcccacccctacctggacgggcccaggcttggggactctgagctgtgttaaggagaacaagggcaaggagacctccctttgtgctccctcactccctaataaacatgagtctgatgttctccaaaaaaaaaa

SEQ ID NO: 553 - DNA, 1451 bp, Homo sapiens
ttttttttttttgaagttcaaatgtatcaaattattaaaaatgcagcatttttcacatgagctttaaagatgtggaagatggggtacaattaaaaccatgagagttgtgcagggaacagccgtagggcctgtttgcaccttcagatattgcctgctcccaaaaattcagacccccagatgcagggcaagacaataagaaagggtgagtgcaagcaaggagagcctcctgctaagaggctgaggtcccctctggttccaaggatgggatgtcagccttgaccttccggggtctgcagtggccagaggctgcctgtcgccccttcctcctccccttcttgggcactgtgggagcttctgggtcctgctggaggctggtcccctcaggccgctgggttgcagtcctcttaggaaggtctctctttgcccttcgtgtcctggaaggggccttgcttggaggcaaagcgtcctccactctgtcctcaggactcagctgtgtggccttggatttctttttgcgggacttgcgccctgcaggacactggtgttggagttggagggtcctatcctgcccaggggtgactcccagggttgcagggggatagggtggagaagggtgctgtagcccttgcaggcgtgaagtcctttctgctctcttagcctattacattaggagtagcttacctttgggtgccaacggtccaggatccccctaaaatgggatggggataattcaggaatcagcctgggttggcacaggggcggtattccttggagaggcaggactcacacacacccatccagatcagtgtagcttctcccttaggaagcctctaggacatcccccatgttagagtccacatcagcaaagctgctctgcccttggctactttcacttgggctacctgccttgggctacttccactagctgcaactctgggacgcatgggtggggagggatgtgaccctcaggaacagtgtggtccttggagggtctagacagaccctgagcatcaccaccccagttattgtgaccccacgtttccacccatcagcctcctggggtctctgcctgtgtgaacagtagggcccaacctggaaccagatggtacggccatgccggtcctgcagggagctcatgcctggcatgccatagcagcgcagccaggctcgaaaggcagcaaagtcctcctccccgctctctgacccgtagcctttgccccctgtgggacagaggaacaggcagagatcagagggcaggctcaggttgggaggagtggggagcctggttagacctggcccagacctcagctacacaagctgatggactgagtcaggggccacactctccctcctctggtgatgtgacctcagctggtttcttcccactcggccatgggtttcccatcctggagtgggattaagaatccttgtcctggccctgtgcagtggcc

SEQ ID NO: 554 - DNA, 1663 bp, Homo sapiens
ctctggccactgaaaaacttctcactataaagcatgtattcaaggattaccaatgcaaatgggcagcaattaacctggagaccccatgcctatggcagtctcaagaacggaactagagatgctatgtttgaaaatcgacgcatgattaaagcgatacttctggaagcatgcagggcaggcggcccggccatgacgcacagactctgtacagccctgcagacctcagccaccatgctaacaggcggacacttttaccatgcaatcaagggcacgggatcagctgctttgggaagacttatttccaccccctccagtctctcaggctggagcgcagtggcgtgatctcaactcactgcaacctctgcctcctaggttcaagcgattcttctgcctcagcctcctgagtatgtgagactacaggcacgcaccaccacgcccagctaatgtttgtatttttagcagagatggagtttcaccatattggccaggctggtctcgaactcccgatctcgtgatctgcctgcctgggcctcccaaagagctgggattacaggcgtgagccactgcgcccagccaggaagactttcttcatggcaaacagtgggttctttcaggggacatttctgtaatgtacaaaagaacctgcaaaaacaaaagcacctagggagacagaagactgggaaaggcccatgaagggcagagctctctcagtaatggaggaaactaataggactgctgctaatggagccccaggtgagccctgggattgcaaggccaccgctggcacaggcaaccatgcttgtgtggaggtgcaggcgtgagcccttctgcaagggggctctctgccagcacccatgcagggctcagaagggggcctggctgtggatcttgctgggttccagcagcacagaggcccactggcctctgacgcaacatacgcctggggaagtgtgcaggcccagcggagacagaactgccaagagtctggactcacggtagtcttcagactcgtccaggatctcggacctgatgatctcctcgatcacgtcctccagggtgaccaggcccaggacctcgtagaaggggtcgccttcaccctcgttgttcaccttctgcacgatggccaggtgggacttccctgtggggggaggacactcatggaacagcttgctgggccccccccagtttgattcatctcccctggtataggcccaccaaaaggacacggctaacgttcatgctcctacaacgtgccaggcacagagccacactcttttctaggtttttacttaagactcccagcgtgattatgagaactggccttattttcacacaggttgaaaatgaagcagtgggctcatgcccatctgcacaaggccccccaggcagagctggcagagctgggatccagctccaggtccgtgcacctccatgacatggatgcagtttagacaaggatgcctccctccagtggagaacacaaatgcctcacacatcagccagcctgcacatgcaggctaacaagggcactgactctggaaacacaggctctcctgcgacagtccacacggggcagctgagtggggccacccagcctgactgtccttgggaggatttcctaagtctttttcttcttaaagtaaatatatatgctgtccatcct

SEQ ID NO: 555 - DNA, 1040 bp, Homo sapiens
gcatggaattcggcacgaggagctgtgtcaccactgtgggtccctggttgtttcctcaccctgtccgtgacgtggattggtgctgcacccctcatcctgtctcggattgtgggaggctgggagtgcgagaagcattcccaaccctggcaggtgcttgtggcctctcgtggcagggcagtctgcggcggtgttctggtgcacccccagtgggtcctcacagctgcccactgcatcaggaagtgagtaggggcctggggtctggggagcaggtgtctgtgtcccagaggaataacagctgggcattttccccaggataacctctaaggccagccttgggactgggggagagagggaaagttctggttcaggtcacatggggaggcagggttggggctggaccaccctccccatggctgcctgggtctccatctgtgtccctctatgtctctttgtgtcgctttcattatgtctcttggtaactggcttcggttgtgtctctccgtgtgactattttgttctctctctccctctcttctctgtcttcagtctccatatctccccctctctctgtccttctctggtccctctctagccagtgtgtctcaccctgtatctctctgccaggctctgtctctcggtctctgtctcacctgtgccttctccctactgaacacacgcacgggatgggcctggggggaccctgagaaaaggaagggctttggctgggcgcggtggctcacacctgtaatcccagcactttgggaggccaaggcaggtagatcacctgaggtcaggagttcgagaccagcctggctaacatggtgaaaccccgtctctactaaaaatacaaaaaaaaagtagccaggcatggtggcgcatgcctgtagtcccagttactcaggagactagggcaggagaattgcttgaacctgggaggcaaaggttgcagtgagccgagatccgtgccactgcactccagcctgggtgacagagtgagactccgcctcaaaaaagaaaaaaaaaaaagtctcgacggtcga

SEQ ID NO: 556 - DNA, 1331 bp, Homo sapiens
ttttttttttttcatacacaagccggtgatactttattatataagagagttgtcaaaaggacagtttcatttctgtttcagaatccccacattccagtgatccatctgttgacacaattaacataaactatttgctgatatttactgagtgcttgcaatgtatcagagtcattaaataagatgcaacttctactgtgaaaactggaatcttcattaggacacagacttagaaaaggcccagtttcaaggattctgacttgcacagactgagcactcccatttccagaagttcgaatacctcctttcttatctcgggaatgtccatcattctcctcaacttctgatctctccagttccagtcaaaaaccagaaattttaaggggctcaaattaaggccaccttgtttaacaagttctttaattctccccggagttcctacacccaggtgcaccacacgcttctccagcaactttacctgcgcctggacctttatgtgctttgcaaataattttataactttgccgtctcctctgaatgctgtcatcgacctaatgagctccagggctcggacggccgagctgcagatgatcagcatcaggaccgatttcttctcactgtggttcttcctaagttttacccacttaggacaaatttcttttaggtatgaggaaagactgtgagtcaaatcattggccttgaggaaacaggagtctggcaggttcagttcttctaattcaatcaccaagcgtctgctgctataatagtccttcatcagcttctgtaggtcttcaggtaaccctggttttggttctgattttgcaagaacatcagtaattttcttctttcttcttttcctggtcttggtggtattctcttttctttcctttggttgtatcaaaaaacattctttaggctgtttggttttctctgaaggtacaggaactggaactgtctcctgctgcatcacttctgtgtctccttctccttcaccatctgatgcttctgggctgctgcctgctccagtcggctggttctcccaccactcgtctccgagatcgtctgccatttcagctcaggtctcgacgtgggcagaacatcacgggtaggcgaccagctgcggagaatcacgttgtctcaaagccaggcggccggcgtagctacacgcggagctcccgctagacactgtcgcctccgccccgcggcgatgacgtcacacctctgccccgcctctccggcagccgctcccagactcgtcgcagtttccacacaggcgccgacaggcagaagcagtttggaaacgcaacataaatccccccaaagatttatacttg

SEQ ID NO: 557 - DNA, 971 bp, Homo sapiens
ttttttttttttgatctaagaaactttattgctcagaaccttccctccctgggcaatggaaagagctttggagaccagcccatggggacagagtcagaggcactgggtgtaaaaaagagcgagcgtgtggcacatttggtccattgtcatgtgcgggtatggcaggaggagggggtaatctagaagccccacatctagggccttctagggacccagatatgcccccttaggcaaggctcacatgccaaagcaaagcagatgaggtcagcctggcttgggttgagggctcagtgcctcttagccttgccctggggttcttggaccttccggaaactgagccacatcaggctcacgttgatagcataggtggtgatacaaacaatgcagaaatcatagagcacgaagaacaggatccaggccaggtagacagaaccagcgagagacaccagggagctcagcagcatcaggacagaggcccagcgtgtccgcaggcaacctaacaatagctgtagtgtgtagaagatgcaaccgaatatgctgttggattgattgaggatgctgtcctgtcccagcacatgctccaccagcccgaaacccctgccccacctggaggagaagacgcgcgaacagctgatggcggtgcccacgtcgcagagcgcgcggtaatcccggtcccgggcgcgcgccgccttcacgtgcagcgcgtagagcgagagcactaagcccgtcaggcaaagagcgagccgcacccagccagggctcccccaggtgctgcccattatctccaggttccgcccgaggcgcccgcggagaaaaccagccacggagcaggggccgggcggcgaatggccgcgcccctcctggccctctgactcggcgattggccggccgtgctcgcactccacgacccaaatggctgttccagggcgctagtcaagcgggcgagttaggaaaacagcgaagaatgccgg

SEQ ID NO: 558 - DNA, 1575 bp, Homo sapiens
ggagtcccccgcgccccccgcgttccgcccggccatggctgcggtggcgctgatgccaccgccgctgctgctgctgctgctgttggcgtcgccgcccgccgcctccgcgccgtccgcccgcgatcccttcgccccccagctcggggacacgcagaactgccagctgcggtgccgcgaccgcgacctcggcccgcagccctcgcaggcggggctggagggcgcctccgagtctccctatgacagagccgttctgatcagcgcttgcgagcgtggctgccgcctcttctccatctgccgatttgtggccagaagctccaagcccaatgccacccaaactgagtgtgaagcagcctgcgtggaagcctatgtgaaggaggcagagcagcaggcctgtagccacggctgctggagccagcccgcggagcctgagccggagcagaagagaaaggtcctggaggctccaagtggggccctctccctcttggacttgttttccaccctctgcaatgaccttgtcaactcagcccagggatttgtctcctccacctggacatactacttgcagactgacaatgggaaagtggtggtgtttcagactcagcccatagtggagagcctcggcttccaggggggccgtctgcagcgcgtggaggtgacctggcgaggctcccaccctgaagccctggaggtgcacgtggaccctgtaggccccctggacaaggtgaggaaggccaagatccgagtcaagaccagcagcaaggccaaggtggagtctgaagagccacaggacaatgacttcctcagttgcatgtcccggcgctcgggtctgcctcgctggatcctggcctgctgcctcttcctctccgtgctggtgatgctgtggctgagctgctccaccctggtgaccgcgcctggccagcacctcaagttccagcctctgaccctggagcagcacaagggcttcatgatggagcccgattggcccctgtacccgccgccgtcccacgcctgtgaggacagcctaccaccctacaagctgaagctggacctgaccaagctgtaggcctccactggccccatcactgccaactgcagggggcccctcgggcctcacttgccctgagcccagggagtccaagggcagggtgggtccagccttgagcccctccacccccaaatccttcctctcctcccagacccaccccttgccccacggagtcctggggacgcagtgccccagctgggaagagggcgggatcgggcactggttcctccttgtccccgctttcttgggggcttgctactttttgtcttctattgtgtggctttctgagtatttgaaccccagtcctgtgtcaccttcctttttccttctctgtcccctctctgcgggggggcgctgaggctgagggggagctgcgtcttgctagggcttcccccttctccccatcccggtctccagagacccagcttctgagagacagggtgtgggcatctccatgcccctataaagcgtgcctggggcttgtctggggctggggaggaataaaccatgtatataaaagaaaaaaaaaa

SEQ ID NO: 559 - DNA, 820 bp, Homo sapiens
ctttcccgagcttggaacttcgttatccgcgatgcgtttcctggcagctacattcctgctcctggcgctcagcaccgctgcccaggccgaaccggtgcagttcaaggactgcggttctgtggatggagttataaaggaagtgaatgtgagcccatgccccacccaaccctgccagctgagcaaaggacagtcttacagcgtcaatgtcaccttcaccagcaatattcagtctaaaagcagcaaggccgtggtgcatggcatcctgatgggcgtcccagttccctttcccattcctgagcctgatggttgtaagagtggaattaactgccctatccaaaaagacaagacctatagctacctgaataaactaccagtgaaaagcgaatatccctctataaaactggtggtggagtggcaacttcaggatgacaaaaaccaaagtctcttctgctgggaaatcccagtacagatcgtttctcatctctaagtgcctcattgagttcggtgcatctggccaatgagtctgctgagactcttgacagcacctccagctctgctgcttcaacaacagtgacttgctctccaatggtatccagtgattcgttgaagaggaggtgctctgtagcagaaactgagctccgggtggctggttctcagtggttgtctcatgtctctttttctgtcttaggtggtttcattaaatgcagcacttggttagcagatgtttaatttttttttaacaacattaacttgtggcctctttctacacctggaaatttactcttgaataaataaaaactcgtttgtcttgtcttctgcc

SEQ ID NO: 560 - DNA, 1601 bp, Homo sapiens
ttttttttttttagggatgcattttgaatatttattgtccttgtttttaacataatttgcaaatttacataattataatggctgtgtttgacaactggcttgcaacaaaattcttgaaaattgaataattggcccacctgggctgggatgagccagctggatcacaccgttgccccctcagcctctaggaggcctcaggattatggcgtccatcttatgatattggccgaaaggagacagtcttggaggtgctgcttactgttgaacttccttttggaatgtatgggagaaggcagggaaaggaatctttaggcagactgccatccagggactgctattctgttcactgagattcagctgtgaacatctgttctttcttcctcttctgtctactgcatgcaggcccggaagctgagcgttagtcaaaggtacaggaagggaaaagagaagagggcaaggcccatcccccaagaaaggaagggctctgatgcagagggagcaggagctgaggtggagacggccactgcctctctcaccctctgttccatccctctgctcaagaaaaccaggcttagcagagtgggacagacgctttttattggtctggctggcgtgcctagtggaaagctcaggcagagcttcctatcttgccctggctcccatcttccctctcctgggagttcatcacacatcccgagagggaagagtgtcctgggcagaggtggcaggcaaagccgggtaaaaactccagggctgggaagcaaatggggctcagggtgatgcagaaaatgtgatgttgccaggccatccaaataaagcatccatcggggcagaggagaagctgtttccctgcagacactcctctgcccccaccaggaatgggaggggcaggaggaagagcttcccagagaggctccctactgggcccttcgtgccatcagcatctcccggatgttgtcctcagcttccttaacgcttcgctccaggtaggactttttctgttctagttctttaattttttcttctgctattttctgcttctctaacagctgactgtgaattgcttccttggactgaagaataaacattcttcctacaccttcatacatgttagtctcatctaccaaagtcatgatctctgtatctgtaagatgtgcatgctttttcgttctgtttagctgttcaatctgtatgtctgcgagcttcaccttctgttgagtgtcaataactttggcttgaagctctgtgaaggctatgaaagtgagtccctgaagcctccaaacgcaacgaaatgtctctggagctcagaaagactggacaagcccgagacaggcccgcagacttacccgacccagaccaaccggctcctacccagcaagagccgctcgccccccaccccgtttatggagacccagtgaggccttaggactctgggaaaccattccctagtccactggaccctccttccttctgcaaggctcgtgcctcacttgatattcttgtctatagtcccctcagcctccaaaaagaagacctccgcctgccaaagaccctcttttaccttcttcagctctagatccacgggggcggccactcgtgcc

SEQ ID NO: 561 - DNA, 797 bp, Homo sapiens
  misc_feature (1)...(797): n = a,t,c or g
ctcactcactcctgcttggcacgagggtccgagatgcttctagcaagatccagggcgagtacacgctgaccctcaggaaaggcgggaacaataagctgagcagggtcttccaccgagatgggcactatggcttctcagagccactcaccttctgctccgttgtggacctcatcaatcactaccgccacgagtctctggcccagtacaatgccaagctggacacacggctcctctaccctgtgtccaaataccagcaggtccgtgctggcctgggagccagggagggtagcacctggctggccccaggcctcagtttcctaggtagacccgaccaggctatgcatctcccctcattccgccacgtatctccaggaccagattgtcaaggaggacagcgtggaggcagtgggcgcccagcttaaggtctatcaccagcagtaccaggacaagagccgcgagtatgaccagctttatgaagagtacacacggacctcccaggagctgcagatgaagcgtactgcaattgaggccttcaatgagactatcaagatctttgaagagcagggccagactcaagagaaatgcagcaaggaatacctggagcgcttccggcgtgagggcaaccgacgaaagagatgcaaaggatcctgctgaactccgagcggctcaagtcccgcattgcccgagatccatgagagccngcaccgaagctgggagcagcagctgctggtgcccagggcttcggacaacaagagagattcgacaagccgcattgaacaagcctcaagccggacctc

SEQ ID NO: 562 - DNA, 1772 bp, Homo sapiens
ttttttttttttacatctgaatgtattttaatataaaaataacagctttcccccaattctcgctctaggaaaatgtgctatgctcaccttccctctacccctgtcccatcaggcccagagccaaggccatagggctgctgaatacacatgtgagggggccgaggggaagacaacagtaccaggagggcaggcagggcacccccaggctggccagtggaggggtgggggtatcgatcccgccgggggctggcttggttgctggtgccctgagcccttctctgcccgcctgggtgttgccttcactgatggaggtaggcgtccagccagatgtcaccagacttcttcagggacctgacgatgtccaccagcgcggtgaggaagggcttcacttcgtagctgaggccgtgcttggcacacagcgacttgaccagcggggccacccggctgtagttgtgtctcggcatcctggggaagaggtggtgctcgatctggaagttgaggtgcccgctgaaccagttggtgaaaagtgagggctccacgttgcaggtggctgccagctgagagctgacccagtcccggtgcttctcgtggccgatctccttggggatgtggttcatctgtgtgatccacacgaaccagtggctttccaggaccctgacagcaacaaagaagagcagcaccccagggacgccgtagaaggggaggtaggataagaagaagcgggcatagaagctggcggcccagagcaaatccgcccactgcatgcacaccagcatgtacgccagattttccacttcaaagttcaccagggtgagcagcggcgggccgatcaggaagaagtacaggtgctgctggttgtagggtaggtatctgcgtttcttcttgccatactcgacggatgactcccccaggaggaagacgggcgccaccgtcacgtctgggtctttgtggaagatgttgggcttggcgtggtgctggaagtggcggaagttccaccagtgggcggagaagccctttagctgccccatcacgaacttctgggccacgtggttccaccaggacttcttgaagatggaggcatggcccaggtcatgctgcagacaccaggactgagcctgagagatggccaggatgaaggcggccagggcactgggcacccagccaggacccaggaggtagataaggagccaggccagcacctccatggccaggatgtggcccagtaggaaagcaaagaaggtgggactggcatcaaacagcttcatgtcctcggctgcctggtgcagggctcggaagtcctcgaccagctgcgcattcaggggtccatcctggctgggttcttccggagccagctctccaatcaacaggggctgtaggaacttgcgcacaaaattgagatcttgatggaaggcacggaaggcatccgtggcgtcctcagcgccgtggtggccgatgaggcggctgccccctgggtgccgctgtgcccagcggctgatgtcgtagacgcggcgctcgatgaccagccacttgtcgccgggctggtcgtgcgcgcggatctgctcccagcagaaggtgggcagcggtgcccccggctgcgcgggtccctcccgcggtcccggctccccgacgccgcccatgctgcacgcacgagtcctggggatcccaggcggtggccgaggtccgagcaagaccccgagggaagcgaagagcgctcccgggcgccgcctccgccgccgcccgctgctccggccccgccctgccgccgcggccgc

SEQ ID NO: 563 - DNA, 521 bp, Homo sapiens
ttttttttttttggaattacaaagctacttttaatactttggggtgagccccacaggaataaaaaacactgggaaggggtaaccccctcacccccgggagtggcccagggggagagaggctacctgaggggaaggaagcacaaaagggacccgctgcagactcagggcaaagggaatgccatcggtgctgggacctgtgagcactacaggaggaaacgcgagcgtggtgggactggctccaggcacacaggcgaagggcaagagggttggacacgaagccacaaagctacttgggttcctccttcttctcgtttgcctttttctgcttctgctgcatgatctccgagtccctctgcttgcgggcggcagcagaaagcccgtcatctcggcgctttcccttaaccgagtcgctctgctttttcatattcttctggcgggcgagctcacgctggttaccgcgggtcatggcgacggcagcggctccaacctgcctccgttacgtcccctcgttccctcgtgcc

SEQ ID NO: 564 - DNA, 840 bp, Homo sapiens
atccaataccggagtgacttggaactccattctatcactatgaagaaaagtggtgttcttttcctcttgggcatcatcttgctggttctgattggagtgcaaggaaccccagtagtgagaaagggtcgctgttcctgcatcagcaccaaccaagggactatccacctacaatccttgaaagaccttaaacaatttgccccaagcccttcctgcgagaaaattgaaatcattgctacactgaagaatggagttcaaacatgtctaaacccagattcagcagatgtgaaggaactgattaaaaagtgggagaaacaggtcagccaaaagaaaaagcaaaagaatgggaaaaaacatcaaaaaaagaaagttctgaaagttcgaaaatctcaacgttctcgtcaaaagaagactacataagagaccacttcaccaataagtattctgtgttaaaaatgttctattttaattataccgctatcattccaaaggaggatggcatataatacaaaggcttattaatttgactagaaaatttaaaacattactctgaaattgtaactaaagttagaaagttgattttaagaatccaaacgttaagaattgttaaaggctatgattgtctttgttcttctaccacccaccagttgaatttcatcatgcttaaggccatgattttagcaatacccatgtctacacagatgttcacccaaccacatcccactcacaacagctgcctggaagagcagccctaggcttccacgtactgcagcctccagagagtatctgaggcacatgtcagcaagtcctaagcctgttagcatgctggtgagccaagcagtt

SEQ ID NO: 565 - DNA, 4345 bp, Homo sapiens
tcttgaattcccgggtcgacgatttcgtgccgcggctgctgcgggaagtggccagttcaggaggcggaccccccgagggcagcgctgcggggccgttttccggccctcctgacgcgacactgcccctctccgagagctgagaaggaaaagaggagcttgcggaggtgcggctgcaggccgttgttggtcgagctggcgggtcccgcgggccaggccgtggaggtgttacctcattttgaaagtcttgggaaacaggaaaaaattcctaacaaaatgtcagcttttcgaaatcattgtccacatttggattcagttggtgaaataacaaaagaagatttgatacaaaaatcccttggtacttgtcaggattgtaaagtccaaggaccaaatctttgggcatgtctggagaatagatgttcatatgttggctgtggtgaatcacaagtagatcacagcaccatacattctcaggagacaaagcattatctaactgtgaaccttaccactcttcgagtatggtgttatgcttgcagcaaagaagtatttttggataggaaattaggaactcagccttcattgcctcatgtaagacaacctcaccaaatacaagaaaacagtgtccaggattttaaaatacccagtaatacaacattaaaaactcctctggttgccgtatttgatgatctggatatagaagcggatgaagaagatgaacttagggccagaggtcttacaggtttgaaaaatattggaaatacttgttacatgaatgcagctttgcaggctctttctaattgcccacctttgacacagttttttcttgattgtggaggactagctcgaacagataagaaacctgccatttgtaaaagttatctcaaactaatgacagagctgtggtataaaagcaggccaggatctgttgtgcctactactctgtttcaaggaattaaaactgtaaatccaacatttcgggggtattctcagcaggatgctcaagaattccttcgatgtttaatggatttgcttcatgaagaattgaaagagcaagtcatggaagtagaagaagatccgcaaaccataaccactgaggagacaatggaagaagacaagagccagtcggatgtagattttcagtcttgtgaatcttgtagcaacagtgatagagcagaaaatgaaaatggctctagatgcttttctgaagataataatgaaacaacaatgttaattcaggatgatgaaaacaattcagaaatgtcaaaggattggcaaaaagagaagatgtgcaataagattaataaagtaaattctgaaggcgaatttgataaagatagagactctatatctgaaacagtcgacttaaacaaccaggaaactgtcaaagtgcaaatacacagcagagcttcagaatatatcactgatgtccattcgaatgacctgtctacaccacagatccttccatcaaatgaaggtgttaatccacgtttatcggcaagccctcctaaatcaggcaatttgtggccaggattggcaccaccacacaaaaaagctcagtctgcatctccaaagagaaaaaaacagcacaagaaatacagaagtgttatttcagacatatttgatggaacaatcattagttcagtgcagtgtctgacttgtgacagggtgtctgtaaccctcgagacctttcaagatctgtccttgccaattcctggcaaggaagaccttgctaagctgcattcatcaagtcatccaacttctatagtcaaagcaggatcatgtggcgaagcatatgctccacaagggtggatagcttttttcatggaatatgtgaagaggtttgttgtctcatgtgtccctagctggttttggggtccagtagtaaccttgcaagattgtcttgctgccttctttgccagagatgaactaaaaggtgacaatatgtacagttgtgaaaaatgcaaaaagctgagaaatggagtgaagttttgtaaagtacaaaactttcctgagattttgtgcatccaccttaaaagattcagacatgaactaatgttttccaccaaaatcagtacccatgtttcatttccgctagaaggcttggatcttcagccatttcttgctaaggatagtccagctcaaattgtgacatatgatcttctgtcagtcatttgccatcatggaactgcaagtagtggacactatatagcctactgccgaaacaatctaaataatctctggtatgaatttgatgatcagagtgtcactgaagtttcagaatctactgtacaaaatgcagaagcttacgttcttttctataggaagagcagcgaagaggcacaaaaagagaggagaaggatatcaaatttattgaacataatggaaccaagcctccttcagttttatatttctcgacagtggcttaataaatttaagacctttgccgaacctggccctatttcaaataatgactttctttgtattcatggaggtgttcctccaagaaaagctggttatattgaagacctggttttgatgctgcctcagaacatttgggataacctatatagcaggtatggtggaggaccagctgtcaaccatctgtacatttgtcatacttgccaaattgaggcggagaaaattgaaaaaagaagaaaaactgaattggaaatttttattcggcttaacagagcgttccaaaaagaggactctccagctactttttattgcatcagtatgcagtggtttagagaatgggaaagttttgtgaagggtaaagatggagatcctccaggtcctattgacaatactaagattgcagtcactaaatgtggtaatgtgatgcttaggcaaggagcagattctggccagatttctgaagaaacatggaattttctgcagtctatttatggtggagggcctgaagttatcctgcgacctccggttgttcatgttgatccagatatacttcaagcagaagaaaaaattgaagtagaaactcggtctttgtaatttttaggatgtagagagttctaatgaggaatcattttcatgtgccctgacatgtacacatgcgaaaacattcctaaaagcgtgtttatttgctttattttttttcatcatttatcccatttatttcttcttagtgggcattatggaagaatatattaaaatgtgtaatataccacaggttggtatatttagttttaaatacttaccataaagtctttcagtgtaatttttttttgagacagagtcttgctttgtcacccaggctggagtgctgtggtgttacctcagctcactgcagcctccacctcctgggttcaagcgattctcctgcctcagcctctcgagtagctgggattacaggcacctgccaccatgcccggctaatttttgtattttagtagagatggggtttcaccatgttggccaggctagtctcaaactcctgacctcaggtgatccacccacctcggcctcccaaagtgctgggattacaggtgtgagccacagcgcctggcccagtgtaatatttttgaaagaggagggacaattgtgaaatcagtaggttatctttaatctttacactacatgcagatccatagtatcctttgtagtgttgtaaatacttttgctttgaaaactttttcattgtcctaaatcaccctgactctgaccagtctttcagttctccaaaagcccaatttaattgtatagttttgtcatggcttcatataataaagagcctattttaagttgaaagtagtagtcagaaaattgttaatttcctaaagctcaggaaactagggtgtcactttttttgcactgcagcatatacactaactagcttattaaaatttacaaaatgtctttttgaatgtatcaaggatatatttagtttgagtggaatttgtcagcagatatcagtaacttattgccgcttatattgtacaatgttaaacttcaattcctgtaacctggttagtattaatgtcagtgactaaaaaacttagagttagttttagggcactttttattttgagagcatgaagtgtggaatgtgtcactacgattgttgataaagctgaggccacttgcaacttgattttttaaatgaaatagataaagtctttttgaataatatagtatgcactgctatttgcttgattatgtaatgtcaaaagtttaactatattccaagtacaaaaacatactggattacattgaggatgttgaatagcattcatgatggctttgttttggtttggggcagctgtcaccagctaaagcaatgttgttaaaattagctcaataaaaatgtctttaaaatgcaaaaaaaaaa

SEQ ID NO: 566 - DNA, 984 bp, Homo sapiens
  misc_feature (1)...(984): n = a,t,c or g
gtcgtgaggcgggccttcgggctgngctcgccgtcggctgccggggggttggcctgggtgtcattggctctgggaagcggcagcagaggcagggaccactcggggtctggtgtcggcacagccatggcgggcgcgttggtgcggaaagcggcggactatgtccgaagcaaggatttccgggactacctcatgagtacgcacttctggggcccagtagccaactggggtcttcccattgctgccatcaatgatatgaaaaagtctccagagattatcagtgggcggatgacatttgccctctgttgctattctttgacattcatgagatttgcctacaaggtacagcctcggaactggcttctgtttgcatgccacgcaacaaatgaagtagcccagctcatccagggagggcggcttatcaaacacgagatgactaaaacggcatctgcataacaatggaaaaggaagaacaaggtcttgaagggacagcattgccagctgctgctgagtcacagatttcattataaatagcctccctaaggaaaatacactgaatgctatttttactaaccattctatttttatagaaatagctgagagtttctaaaccaactctctgctgccttacaagtattaaatattttacttctttccataaagagtagctcaaaatatgcaattaatttaatactttctgatgatggttttatctgcagtaatatgtatatcatctattagaatttacttaatgaaaaactgaagagaacaaaatttgtaaccactagcacttaagtactcctgattcttaacattgtctttaatgaccacaagacaaccaacagctggccacgtacttaaaattttgtccccactgtttaaaaatgttacctgtgtatttccatgcagtgtatatattgagatgctgtaacttaatggcaataaatgatttaaatatttgttaaatgagtatgattaaaaaaaaaa

SEQ ID NO: 567 - DNA, 1775 bp, Homo sapiens
gtccgggtccgctgcctggcgctgcgggcggcgggccatggtggtttggattgagccgggcccggccggggcgccgagtcggagggggtggcagtgagcggcggcagaggctacggggctcggtttggctgactggggagtcggcaggcggcaggaaccatgcgaggccagcggagcctgctgctgggcccggcccgcctctgcctccgcctccttctgctgctgggttacaggcgccgctgtccacctctactccggggtctagtacagcgctggcgctacggcaaggtctgcctgcgctccctgctctacaactcctttgggggcagtgacaccgctgttgatgctgcctttgagcctgtctactggctggtagacaacgtgatccgctggtttggagtggtgttcgtggtcctggtgatcgtgctgacaggctccattgtagctatcgcctacctgtgtgtcctgcctctcatcctccgaacctactcagtgccacgactctgctggcatttcttctatagccactggaatctgatcctgattgtcttccactactaccaggccatcaccactccgcctgggtacccaccccagggcaggaatgatatcgccaccgtctccatctgtaagaagtgcatttaccccaagccagcccgaacacaccactgcagcatctgcaacaggtgtgtgctgaagatggatcaccactgcccctggctaaacaattgtgtgggccactataaccatcggtacttcttctctttctgctttttcatgactctgggctgtgtctactgcagctatggaagttgggaccttttccgggaggcttatgctgccattgagaaaatgaaacagctcgacaagaacaaactacaggcggttgccaaccagacttatcaccagaccccaccacccaccttctcctttcgagaaaggatgactcacaagagtcttgtctacctctggttcctgtgcagttctgtggcacttgccctgggtgccctaactgtatggcatgctgttctcatcagtcgaggtgagactagcatcgaaaggcacatcaacaagaaggagagacgtcggctacaggccaagggcagagtatttaggaatccttacaactacggctgcttggacaactggaaggtattcctgggtgtggatacaggaaggcactggcttactcgggtgctcttaccttctagtcacttgccccatgggaatggaatgagctgggagccccctccctgggtgactgctcactcagcctctgtgatggcagtgtgagctggactgtgtcagccacgactcgagcactcattctgctccctatgttatttcaagggcctccaagggcagcttttctcagaatccttgatcaaaaagagccagtgggcctgccttagggtaccatgcaggacaattcaaggaccagcctttttaccactgcagaagaaagacacaatgtggagaaatcttaggactgacatccctttactcaggcaaacagaagttccaaccccagactaggggtcaggcagctagctacctaccttgcccagtgctgacccggacctcctccaggatacagcactggagttggccaccacctcttctacttgctgtctgaaaaaacacctgactagtacagctgagatcttggcttctcaacagggcaaagataccaggcctgctgctgaggtcactgccacttctcacatgctgcttaagggagcacaaataaaggtattcgatttttaaaaaaaaaa

SEQ ID NO: 568 - DNA, 1569 bp, Homo sapiens
atcacgtggacgctactcgctattcccggcctgttggcttcttccgcgctggagtatccagataggcgacacgccggcgggcggctgaggcgggaatggctgctgtactgcagcgcgtcgagcggctgtccaatcgagtcgtgcgtgtgttgggctgtaacccgggtcccatgaccctccaaggcaccaacacctacctagtggggaccggccccaggagaatcctcattgacactggagaaccagcaattccagaatacatcagctgtttaaagcaggctctaactgaatttaacacagcaatccaggaaattgtagtgactcactggcaccgagatcattctggaggcataggagatatttgtaaaagcatcaataatgacactacctattgcattaaaaaactcccacggaatcctcagagagaagaaattataggaaatggagagcaacaatatgtttatctgaaagatggagatgtgattaagactgagggagccactctaagagttctatatacccctggccacactgatgatcacatggctctactcttagaagaggaaaatgctatcttttctggagattgcatcctaggggaaggaacaacggtatttgaagacctctatgattatatgaactctttaaaagagttattgaaaatcaaagctgatattatatatccaggacatggcccagtaattcataatgctgaagctaaaattcaacaatacatttctcacagaaatattcgagagcagcaaattcttacattatttcgtgagaactttgagaaatcatttacagtaatggagcttgtaaaaattatttacaagaatactcctgagaatttacatgaaatggctaaacataatctcttacttcatttgaaaaaactagaaaaagaaggaaaaatatttagcaacacagatcctgacaagaaatggaaagctcatctttagtttcagattaaagaaagctttgttttattttgctttgagagaatggtatgttttcttaactataggttattttatagagaatataaaagtataaaacattaaaaataaccctagatatactttaaaataatgttatatttatgctaaaatatgtaaattacactatacaaccatatgataggttatttctctaaccttgtcttctaacgttttaccaaaaattcataatctaatagtttatcagttttcaatagattaaataaaatgattactttaaaaataataaaatttatctaatttaaagttgatattatttttggccgttagttatctattactagtgatcagttatactgttttctatagctactttatttaacagcacagatttctatgcacctttactctttcctcaacccttgtctctatctgtacataattgctttgtcttgatgtttctatcaactatatcatgactatctattggttccataactctgtatcatgtgtattttcttattctggtataccacaaatgattcatgcaaatgaatttttggtgattgaaaaatattaaattcccaatttaaagtaaaaaaaaaaaaaa

SEQ ID NO: 569 - DNA, 1207 bp, Homo sapiens
cccacgcgtccgctcaaacatggccgccacggcgcctctggaagggaaccgctctgggccccgcctttgatctcgttggtggggctgggggatgagagctgcaccgcgcgggacaagtcgccggcggcgcccgacggagcagaagagagagcatggagctggagaggatcgtcagtgcagccctccttgcctttgtccagacacacctcccggaggccgacctcagtggcttggatgaggtcatcttctcctatgtgcttggggtcctggaggacctgggcccctcgggcccatcagaggagaacttcgatatggaggctttcactgagatgatggaggcctatgtgcctggcttcgcccacatccccaggggcacaataggggacatgatgcagaagctctcagggcagctgagcgatgccaggaacaaagagaacctgcaaccgcagagctctggtgtccaaggtcaggtgcccatctccccagagcccctgcagcggcccgaaatgctcaaagaagagactaggtcttcggctgctgctgctgcagacacccaagatgaggcaactggcgctgaggaggagcttctgccaggggtggatgtactcctggaggtgttccctacctgttcggtggagcaggcccagtgggtgctggccaaagctcggggggacttggaagaagctgtgcagatgctggtagagggaaaggaagaggggcctgcagcctgggagggccccaaccaggacctgcccagacgcctcagaggcccccaaaaggatgagctgaagtccttcatcctgcagaagtacatgatggtggatagcgcagaggatcagaagattcaccggcccatggctcccaaggaggcccccaagaagctgatccgatacatcgacaaccaggtagtgagcaccaaaggggagcgattcaaagatgtgcggaaccctgaggccgaggagatgaaggccacatacatcaacctcaagccagccagaaagtaccgcttccattgaggcactcgccggactctgcccgagccttctaggctcagatcccagagggatgcaggagccctatacccctacacaggggccccctaactcctgtcccccttctctactcctttgctccatagtgttaacctactctcggagctgcctccatgggcacagtaaaggtggcccaaggaaggtgaaaaaaaaaa

SEQ ID NO: 570 - DNA, 524 bp, Homo sapiens
atttcatcacaggtaaagggattgtggccatcttgaggtgtctccagtttaatgagacgctaactgagcttcggtttcacaatcagaggcacatgttgggtcaccatgctgaaatggaaatagccaggcttttgaaggcaaacaacactctcctgaagatgggctaccattttgagcttccgggtcccagaatggtggtcactaatctgctcaccaggaatcaggataaacaaaggcagaaacgacaggaagagcaaaaacagcagcaactcaaggaacagaagaagctgatagccatgttagagaatgggttggggctgccccctgggatgtgggagctgttgggaggacccaagccagattccagaatgcaggaattcttccagccaccgccacctcggcctcccaacccccaaaatgtcccctttagtcaacgcagtgaaatgatgaaaaagccatcgcaggccccgaagtacaggacagaccctgactccttccgggtggtgaagctgaagagaatccag

SEQ ID NO: 571 - DNA, 2219 bp, Homo sapiens
cgggcggtcgggcgggaacgcagtgttgttggagagcgggggcccggcttcgcggcatttcgccctctccggcccttccggaggctccgggtttgtgccgtgtgcgtgcggggctcggcgctggggcgctcggtaggtctcccgcggggaggaggcggcgggggccccgtgtttcttcctccccggccccccacccgcgccgtgtcttatgtcgctgccttctcttcctgtttttcagctgtcacgaccggaggggggactcgcagccttaccaggcacttaagtattcatcgaagagtcaccccagtagcggtgatcacagacatgaaaagatgcgagacgccggagatccttcaccaccaaataaaatgttgcggagatctgatagtcctgaaaacaaatacagtgacagcacaggtcacagtaaggccaaaaatgtgcatactcacagagttagagagagggatggtgggaccagttactctccacaagaaaattcacacaaccacagtgctcttcatagttcaaatttcacattctttctaattccaagcaattaaccccaaggcaaaactttcaggattgcaccttatgattctggcagatgactgggtctggagcatattagctcttctggggaaaagtactactacaattgtcgaacagaagtttcacaatggggaaaaaccccaaagagtggcttggaaagaggacagagacaaaaagaagcaaacaagatggcagtcaacagcttcccaaaagatagggattacagaagagaggtgatgcaagcaacagccactagtgggtttgccagtggaaaatctacatcaggagacaaacccgtatcacattcttgcacaactccttccacgtcttctgcctctggactgaaccccacatctgcacctccaacatctgcttcagcgggtccctgtttctccgtgttccacagctcgccaatacctcccttacttcaggacccaaatcttcttagacaattgctgtcctgctttggaagccacgctgcagcttaataattctaatgtggacataatctataataaatgaagttcttacaggagatgtgacacaagcctcactgcagactataattcataagtgtcttactgctggaccatctgttttcaaaataacgtctctgatttctcaagctgctcagctctctacacaagcccaggcatctaatcagtctccgatgtctttaacatctgatgcgtcatccccaaggatcatatgtttctccaaggaataaggcacacctcaaacttaacacagtccctattcaaacctttggattcagtactcctcctgtttcatcacagccaaaggttagtactccagtagttaagcaaggaccagtgtcacagtcagccacacagcagcctgtaactgctgacaagcagcaaggtcatgaacctgtctctcctcgaagtcttcagcgctcaagtagccagagaagtccatcacctggtcccaatcatacttctaatagtagtaatgcatcaaatgcaacagttgtaccacagaattcttctgcccgatccacgtgttcattaacgcctgcactagcagcacacttcagtgaaaatctcataaaacacgttcaaggatggcctgcagatcatgcagagaagcaggcatcaagattacgcgaagaagcgcataacatgggaactattcacatgtccgaaatttgtactgaattaaaaaatttaagatctttagtccgagtatgtgaaattcaagcaactttgcgagagcaaaggatactatttttgagacaacaaattaaggaacttgaaaagctaaaaaatcagaattccttcatggtgtgaagatgtgaataattgcacatggttttgagaacaggaactgtaaatctgttgcccaatcttaacatttttgagctgcatttaagtagactttggaccgttaagctgggcaaaggaaatgacaaggggacggggtctgtgagagtcaattcaggggaaagatacaagattgatttgtaaaacccttgaaatgtagatttcttgtagatgtatccttcacgttgtaaatatgttttgtagagtgaagccatgggaagccatgtgtaacagagcttagacatccaaaactaatcaatgctgaggtggctaaatacctagccttttacatgtaaacctgtctgcaaaattagcttttttaaaaaa

SEQ ID NO: 572 - DNA, 1671 bp, Homo sapiens
cgtagcgcccgagtgtcggggggcttacccttttcgggccatgatgccgggaaccgcgctgaaggcggtgctgctggccgtgctgctggtggggctgcagaccgcgacgggtcgtctgctgagtgggcagccagtctgccggggagggacacagaggccttgttataaagtcatttacttccatgatacttctcgaagactgaactttgaggaagccaaagaagcctgcaggagggatggaggccagctagtcagcatcgagtctgaagatgaacagaaactgatagaaaagttcattgaaaacctcttgccatctgatggtgacttctggattgggctcaggaggcgtgaggagaaacaaagcaatagcacagcctgccaggacctttatgcttggactgatggcagcatatcacaatttaggaactggtatgtggatgagccgtcctgcggcagcgaggtctgcgtggtcatgtaccatcagccatcggcacccgctggcatcggaggcccctacatgttccagtggaatgatgaccggtgcaacatgaagaacaatttcatttgcaaatattctgatgagaaaccagcagttccttctagagaagctgaaggtgaggaaacagagctgacaacacctgtacttccagaagaaacacaggaagaagatgccaaaaaaacatttaaagaaagtagagaagctgccttgaatctggcctacatcctaatccccagcattccccttctcctcctccttgtggtcaccacagttgtatgttgggtttggatctgtagaaaaagaaaacgggagcagccagaccctagcacaaagaagcaacacaccatctggccctctcctcaccagggaaacagcccggacctagaggtctacaatgtcataagaaaacaaagcgaagctgacttagctgagacccggccagacctgaagaatatttcattccgagtgtgttcgggagaagccactcccgatgacatgtcttgtgactatgacaacatggctgtgaacccatcagaaagtgggtttgtgactctggtgagcgtggagagtggatttgtgaccaatgacatttatgagttctccccagaccaaatggggaggagtaaggagtctggatgggtggaaaatgaaatatatggttattaggacatataaaaaactgaaactgacaacaatggaaaagaaatgataagcaaaatcctcttattttctataaggaaaatacacagaaggtctatgaacaagcttagatcaggtcctgtggatgagcatgtggtccccacgacctcctgttggacccccacgttttggctgtatcctttatcccagccagtcatccagctcgaccttatgagaaggtaccttgcccaggtctggcacatagtagagtctcaataaatgtcacttggttggttgtatctaacttttaagggacagagctttacctggcagtgataaagatgggctgtggagcttggaaaaccacctctgttttccttgctctatacagcagcacatattatcatacagacagaaaatccagaatcttttcaaagcccacatatggtagcacaggttggcctgtgcatcggcaattctcatatctgtttttttcaaagaataaaatcaaataaagagcaggaaaaaaaaaa

SEQ ID NO: 573 - DNA, 1612 bp, Homo sapiens
cgacagaatggggcctctctggaagttgtcccgggtgttcgccgctggagcccgggtcgagaggacgaggtgccgctgcctggagaatcctccgctgccgtcggctcccggagcccagccctttcctaacccaacccaacctagcccagtcccagccgccagcgcctgtccctgtcacggaccccagcgttaccatgcatcctgccgtcttcctatccttacccgacctcagatgctcccttctgctcctggtaacttgggtttttactcctgtaacaactgaaataacaagtcttgatacagagaatatagatgaaattttaaacaatgctgatgttgctttagtaaatttttatgctgactggtgtcgtttcagtcagatgttgcatccaatttttgaggaagcttccgatgtcattaaggaagaatttccaaatgaaaatcaagtagtgtttgccagagttgattgtgatcagcactctgacatagcccagagatacaggataagcaaatacccaaccctcaaattgtttcgtaatgggatgatgatgaagagagaatacaggggtcagcgatcagtgaaagcattggcagattacatcaggcaacaaaaaagtgaccccattcaagaaattcgggacttagcagaaatcaccactcttgatcgcagcaaaagaaatatcattggatattttgagcaaaaggactcggacaactatagagtttttgaacgagtagcgaatattttgcatgatgactgtgcctttctttctgcatttggggatgtttcaaaaccggaaagatatagtggcgacaacataatctacaaaccaccagggcattctgctccggatatggtgtacttgggagctatgacaaattttgatgtgacttacaattggattcaagataaatgtgttcctcttgtccgagaaataacatttgaaaatggagaggaattgacagaagaaggactgccttttctcatactctttcacatgaaagaagatacagaaagtttagaaatattccagaatgaagtagctcggcaattaataagtgaaaaaggtacaataaactttttacatgccgattgtgacaaatttagacatcctcttctgcacatacagaaaactccagcagattgtcctgtaatcgctattgacagctttaggcatatgtatgtgtttggagacttcaaagatgtattaattcctggaaaactcaagcaattcgtatttgacttacattctggaaaactgcacagagaattccatcatggacctgacccaactgatacagccccaggagagcaagcccaagatgtagcaagcagtccacctgagagctccttccagaaactagcacccagtgaatataggtatactctattgagggatcgagatgagctttaaaaacttgaaaaacagtttgtaagcctttcaacagcagcatcaacctacgtggtggaaatagtaaacctatattttcataattctatgtgtatttttattttgaataaacagaaagaaattttgggtttttaattttttttctccccgactcaaaatgccattggtcatttaatattagtagcctcttaaaaaaaaaa

SEQ ID NO: 574 - DNA, 928 bp, Homo sapiens
ttttttttttttcctgttttcattttattgggaacttcaaagaaaagaaagagagacggattggttcccaagacaagccgtgacgtagactcccaacaagctggggaattctggacagcgaaggggtggacagtgagactcagcacagcccaaagtcaaaggcattagggttgttctgaaaatagagattcaagaagccctggaaaatgctcttatccatgagaagagcacagactgtggggtcccacttcatggctgatatccagagccgcagggctggcgtgtggctcacacagtccagtatcccatacacatccagccgctcaaaccagggccagaggaggtaatcaatcatggatatacaggttccaccaaagaaggtggtgttctgatactcaagaatctcttccaggttgctgaattcctgacgcagggctgccttcagattagtgcattctctcccacatctcaacgctaccaggcactccttggtcaaatgtgggaccttacaaaatagctccaataacatcttttggcgagctcgttcataagggtcatatggaaacagcttccttcctggataagcatcatccaggtactcacaagcaataacagattcatagatcagttgacattggctggtctccaggacaggaatgtggccaaaagggtgctttgtatagtaccattcaggcttgtttctcaggttaatgttgaccacttcatgtctgatgtctttggccttgaggacgaggcgggtcctgtgagaataggggcagaacctcatgctgtagatgcggatcagcccctccgggactggccctgggggctggcttcctgcagagcagcgatggagggggacagggaaaggagaggctagcggacgcgtgggtcggcccgggaaaacgggtccaaccgagggcgtcaa

SEQ ID NO: 575 - DNA, 1116 bp, Homo sapiens
ttttttgggattttgcaacatttaatcaaaaaagaatctggcatcttaaaagttaggtttacaaacttgacacattctcaatattagcaatttatctatttaaacattgtctaagaaaatatgatctatgaagacattaatacattaataagatacttaagagttcattataagctacaacactttgcaaataagtatccagtttaattgtaacaaaccacaatttgtgagcaaatttaagaatataaaaaacattaattagttaaatacaattctctgggaatatacattatacctacagctgtttttacagtgagagtcttcctttttttttccttttaattatcaaaatggtaaatcactgtatggtcctggatctccatgctataaaactgaaatatgtatttccagcgtagcagatggtgaccaggaaggcaaagaacgatgaggccgcccagctgttgaagttgtgactgtccctctcaggggagacggaagatgcatctacaacagcggcagagaggtacaagacgaaggcactgccgttaaagcacaggcccactgttgtccagggcacctggggaatcctggtgtaggtcattgttatgtagataatgaggaagaagacggtgaggacccagtaaaatacagctacaaacatgacccagccaaatgcggggacccggaagtactcagttccagcaataagcgtccataccagcagccccagaacgatctcggccacgatgaggaagccgggcagggtgcggaggaactcccggtcgtaggcgaagctgctgctgctggtatggacgcttattgctggaactgagtacttccgggtccccgcatttggctgggtcatgtttgtagctgtattttactgggtcctcaccgtcttcttcctcattatctacataacaatgacctacaccaggattccccaggtgccctggacaacagtgggcctgtgctttaacggcagtgccttcgtcttgtacctctctggcgctgttgtagatgcatcttccgtctcccctgagagggacagtcacaacttcaacagctgggcggcctcatcgttctttgccttcctggtcaccatctgctacgctg

SEQ ID NO: 576 - DNA, 3246 bp, Homo sapiens
  misc_feature (1)...(3246): n = a,t,c or g
cccacgcgtccgccggacgtaggaggtggaggttgtggaattcgccgttcgaaagcagggactaaaagccccacttcgtcttacgttccgaaaggaaggcgtctgttgagcctttctctcagtcgtgagggaggcgtcgacggcgtgcggaagtcctgagttgaggcttgcgggatcctttccggagaaagcgcaggctaaagccgcaggtgaagatgtccaactacgtgaacgacatgtggccgggctcgccgcaggagaaggattcgccctcgacctcgcggtcgggcgggtccagccggctgtcgtcgcggtctaggagccgctctttttccagaagctctcggtcccattcccgcgtctcgagccggttttcgtccaggagtcggaggagcaagtccaggtcccgttcccgaaggcgccaccagcggaagtacaggcgctactcgcggtcatactcgcggagccggtcgcgatcccgcagccgccgttaccgagagaggcgctacgggttcaccaggagatactaccggtctccttcgcggtaccggtcccggtcccgtagcaggtcgcgctctcggggaaggtcgtactgcggaagggcgtacgcgatcgcgcggggacagcgctactacggctttggtcgcacagtgtacccggaggagcacagcagatggagggacagatccaggacgaggtcgcggagcagaaccccctttcgcttaagtgaaaaagatcgaatggagctgttagaaatagcaaaaaccaatgcagcgaaagctctaggaacaaccaacattgacttgccagctagtctcagaactgttccttcagccaaagaaacaagccgtggaataggtgtatcaagtaatggtgcaaagcctgaagtaagtattctaggtttgtcggaacaaaactttcagaaagccaactgtcaaatctgattagccacttatatcttagactatactttttgggaagtctagagatgtatataatgtgctaaattcaaagtagcaaatctgaagataggcaatgtcaaacccatgaaaatgggagattaatgagctttatttggccgtgcatggtgcctcatgcctgtaatgaggcagatggcttgagtccaggagttcaagactagcctgggcaatgtggcaaaaccgcgtgtttacaaaaaatacaaaaattagccaggcatggtggtgcatgcctgtagtcccagctgtttgggaggctgaggcaggaggatctttgagcctaggatgctaaggttgcagtgagccaagatggcaccattgcactctagcctgggcagcagagcgagaccctgtctcaaaaaatacatttatttttttcattttcagttaacagtgtactcttataacaccgttattagctggtactttggtgatttctattactagtttttctaagctatttacagagtgtttgtagctttcatttgcagcattatgttcccacaaattctgtactcagcatatacagtatagtttatctgctctatttctgtcttatagaaatcatgaatgtggtctgcagacattgatgaagaaaatctgttggtaattgatacatgggctaaagcatcagaggtttaatttgaagtttatgttcacacactgaaaacttagtttttttgttggtagatccatgtgcatgctagaatttgggacaggcactatttgcataaagtattaaagtcaatttttaaactaagcaaaggtacacgttgtaacggtggggcatctgtgaaaaagatgtccctttcataatatatgcaatatattccagatgttttgagagattacagaagaggaggcctgcttcacttgcagctgtcggaaaaggtaacagaagatggaactcgaaatcccaatgaaaaacctacccagcaaagaagcatagcttttagctctaataattctgtagcaaagccaatacaaaaatcagctaaagctgccacagaagaggcatcttcaagatcaccaaaaatagatcagaaaaaaagtccatatggactgtggataacctttggtccatctgtgctatctctcatatctgcaagagaaacctaaaatgttaatatttgagtgttaagtatttacatctttttgtgttggtttttaaatgcacaagtacccctgaatggctcaaagggatgggataatgctagaaacactaacttgcaataaagtgcagttttcatgcaaacttagccatcagttttcttcttttagataggtatccacagtccatatggactttttttctgatctatttttggtgatcttgaagatgcctcttctgtggcagctttagctgatttttgtattggctttgctacagaattattagagctaaaagctatgcttctttgctgggtaggtttttcattgggatttcgagttccatcttctgttaccttttccgacagctagacaggttaagaaaaagtgtaattttaaaacacatacccttggtttctaaatcctatattaaaaaatagcctaattgtaaacaaaatttagctgtagacacaaaaatcaacttggatctaacagcctaagtaacagaactattgagttttccccttaacaaaactgatttaatattaggcttaagacactcttcccataattattttacttccctgctggcaaatttaaactaattttttaatcagttttctcaggttgaatcaagttcacttttgaaatgtaaagccacatcagaaaatacgttttaagaaactaaggcatttgccagttaggcacctaatcgtctgaacaaagaccttgtctactaatactgagcaaacccacatctgggcccaattacacagattcatttagatacagcatttttttttttttaagcccccgagacgggagtcttgctctgtcacccaggctggagtgaaaagtacagtgcaatttgctaatgcacatcctgcacatttctggagaattataataaacttatctgcaagtgaagcaggcctcctcttctgtaatctctcaaaacatttcaggctttgcaccattacttgatacacctattccacggcttgtttctttggctgaaggaacagttctgagactagctggcaagtcaatgttggttgttcctagagtttcgctgcattggtttttgctatttctaacagctccattcgatctttttcacttaagcgaaagggggtntctnccgcgacctcgtcctgga

SEQ ID NO: 577 - DNA, 2393 bp, Homo sapiens
tttcgtgctaacctcgcagcagagaggagttgagggcgatgagagcgggtactgcgaactgccgggcgatgctgtcgctgccgccgtgatacggagagcaacagttccccagcaacacccctccccgacacaggcacacaccccccgacaggcacgcacacccaccccacagtgcccggctcggctgcgcctcctctattggcccaggaagcccacccagccccgccacgcagagcccagaaggaaagaaagcctcatgcctgagccgaggggagcaccatggatctgacaaaaatgggcatgatccagctgcagaaccctaaccaccccacggggctactgtgcaaggccaaccagatgcggctggccgggactttgtgcgatgtggtcatcatggtggacagccaggagttccacgcccaccggacggtgctggcctgcaccagcaagatgtttgagatcctcttccaccgcaatagtcaacactatactttggacttcctctcgccaaagaccttccagcagattctggagtatgcatatacagccacgctgcaagccaaggcggaggacctggatgacctgctgtatgcggccgagatcctggagatcgagtacctggaggaacagtgcctgaagatgctggagaccatccaggcctcagacgacaatgacacggaggccaccatggccgatggcggggccgaggaaaaaaaggaccgcaaggctcggtacctcaagaacatcttcatctcgaagcattccagcgaggagagtgggtatgccagtgtggctggacagagcctccctgggcccatggtggaccagagcccttcagtctccacttcatttggtctttcagccatgagtcccaccaaggctgcagtggacagtttgatgaccataggacagtctctcctgcagggaactcttcagccacctgcagggcccgaggagccaactctggctgggggtgggcggcaccctggggtggctgaggtgaagacggagatgatgcaggtggatgaggtgcccagccaggacagccctggggcagccgagtccagcatctcaggagggatgggggacaaggttgaggaaagaggcaaagaggggcctgggaccccgactcgaagcagcgtcatcaccagtgctagggagctacactatgggcgagaggagagtgccgagcaggtgccacccccagctgaggctggccaggcccccactggccgacctgagcacccagcacccccgcctgagaagcatctgggcatctactccgtgttgcccaaccacaaggctgacgctgtattgagcatgccgtcttccgtgacctctggcctccacgtgcagcctgccctggctgtctccatggacttcagcacctatggggggctgctgccccagggcttcatccagagggagctgttcagcaagctgggggagctggctgtgggcatgaagtcagagagccggaccatcggagagcagtgcagcgtgtgtggggtcgagcttcctgataacgaggctgtggagcagcacaggaagctgcacagtgggatgaagacgtacgggtgcgagctctgcgggaagcggttcctggatagtttgcggctgagaatgcacttactggctcattcagcgggtgccaaagcctttgtctgtgatcagtgcggtgcacagttttcgaaggaggatgccctggagacacacaggcagacccatactggcactgacatggccgtcttctgtctgctgtgtgggaagcgcttccaggcgcagagcgcactgcagcagcacatggaggtccacgcgggcgtgcgcagctacatctgcagtgagtgcaaccgcaccttccccagccacacggctctcaaacgccacctgcgctcacatacaggcgaccacccctacgagtgtgagttctgtggcagctgcttccgggatgagagcacactcaagagccacaaacgcatccacacgggtgagaaaccctacgagtgcaatggctgtggcaagaagttcagcctcaagcatcagctggagacgcactatagggtgcacacaggtgagaagccctttgagtgtaagctctgccaccagcgctcccgggactactcggccatgatcaagcacctgagaacgcacaacggcgcctcgccctaccagtgcaccatctgcacagagtactgccccagcctctcctccatgcagaagcacatgaagggccacaagcccgaggagatcccgcccgactggaggatagagaagacgtacctctacctgtgctatgtgtgaagggaggcccgcggcggtggagccgagcggggagccaggaaagaagagttggagtgagatgataggaaggactatgacaaataaaaaaaaaa

SEQ ID NO: 578 - DNA, 1258 bp, Homo sapiens
aagaaccgagggagaagccggatgtttgcaaacaatcgaggagacgacttgcggaccagacggcgcggacgtgttcgtacccggagcctctgcgtggaagagcgcgttcgtcgcgaccctgccgctgctgttggtcctcgcggcgctggcgctgggcgtcctccggaagcagcggagaagccgagaaaagctgaggaagcaggcggagaagagacaaggtgagcggggacagggcgttctgcacgcacctgcccaagtgccaaaacccgccgtcatctaaaggctgtgggtcccgttacgagggtttattccagcgcgaggtgtcagggcggccaccggggaacggggatcggtgaccccggtggggaagggggaagatcgttcatatggacaaaagcggaggtgcggaacggctgcattttccacggaggctagtgcacagatgtcagggttgaccggctgctgtcgttacgccctcggagcttcacatcacactgtacagagggagcggtgaccagggtctctgctgccagcgccacctcgtccaggttttcatagcgcacagggagtcgggcggatgcgcaacatctccgcacagggtcaggaagcggcggtcaggcaccgagaaaacagcccagttacgtgaggcagtgtccggggcttaacgtttccgccgagctaatagatttgggaggctccgaccctgattttcacactagcaggagggagggcgctgggtcaccctcctatgcagaagggcagccaagggtgcgcacttccccatcccctgcctggagcctcacttccagcccagcctgggcccgcagaccaccgcgggtgggagtgccgcatcggaggtgaggcctcagtgttcacccatctgttctgtctgcctcattccccaacctgagagtctttccccttttcttcatcttttttttttttttgcccaaaaaaaaccccccggaaaaggggggaaattttggggggggggcccaaagggttgcttgtaagggacccttggccttgggaagggggaggggggccccctttggaacgggggggggaaaaaattaaatttaaaccctccctgggggccccccccctttccctttgtaagggggtaaaagggagggttgcttccccccggcaatttcccaaaaacctttggaaaaaacctggcaagctctcccctggaaaataaaacattccagtaaaaattcttaaaaaacggttaatgggttccgggttatttttt

SEQ ID NO: 579 - DNA, 2003 bp, Homo sapiens
cacgggccgcagcggcagtgacgtagggttggcgcacggatccgttgcggctgcagctctgcagtcgggccgttccttcgccgccgccaggggtagcggtgtagctgcgcagcgtcgcgcgcgctaccgcacccaggttcggcccgtaggcgtctggcagcccggcgccatcttcatcgagcgccatggccgcagcctgcgggccgggagcggccgggtactgcttgctcctcggcttgcatttgtttctgctgaccgcgggccctgccctgggctggaacgaccctgacagaatgttgctgcgggatgtaaaagctcttaccctccactatgaccgctataccacctcccgcaggctggatcccatcccacagttgaaatgtgttggaggcacagctggttgtgattcttataccccaaaagtcatacagtgtcagaacaaaggctgggatgggtatgatgtacagtgggaatgtaagacggacttagatattgcatacaaatttggaaaaactgtggtgagctgtgaaggctatgagtcctctgaagaccagtatgtactaagaggttcttgtggcttggagtataatttagattatacagaacttggcctgcagaaactgaaggagtctggaaagcagcacggctttgcctctttctctgattattattataagtggtcctcggcggattcctgtaacatgagtggattgattaccatcgtggtactccttgggatcgcctttgtagtctataagctgttcctgagtgacgggcagtattctcctccaccgtactctgagtatcctccattttcccaccgttaccagagattcaccaactcagcaggacctcctcccccaggctttaagtctgagttcacaggaccacagaatactggccatggtgcaacttctggttttggcagtgcttttacaggacaacaaggatatgaaaattcaggaccagggttctggacaggcttgggaactggtggaatactaggatatttgtttggcagcaatagagcggcaacacccttctcagactcgtggtactacccgtcctatcctccctcctaccctggcacgtggaatagggcttactcaccccttcatggaggctcgggcagctattcggtatgttcaaactcagacacgaaaaccagaactgcatcaggatatggtggtaccaggagacgataaagtagaaagttggagtcaaacactggatgcagaaattttggatttttcatcactttctctttagaaaaaaagtactacctgttaacaattgggaaaaggggatattcaaaagttctgtggtgttatgtccagtgtagctttttgtattctattatttgaggctaaaagttgatgtgtgacaaaatacttatgtgttgtatgtcagtgtaacatgcagatgtatattgcagtttttgaaagtgatcattactgtggaatgctaaaaatacattaatttctaaaacctgtgatgccctaagaagcattaagaatgaaggtgttgtactaatagaaactaagtacagaaaatttcagttttaggtggttgtagctgatgagttattacctcatagagactataatattctatttggtattatattatttgatgtttgctgttcttcaaacatttaaatcaagctttggactaattatgctaatttgtgagttctgatcacttttgagctctgaagctttgaatcattcagtggtggagatggccttctggtaactgaatattaccttctgtaggaaaaggtggaaaataagcatctagaaggttgttgtgaatgactctgtgctggcaaaaatgcttgaaacctctatatttctttcgttcataagaggtaaaggtcaaatttttcaacaaaagtcttttaataacaaaagcatgcagttctctgtgaaatctcaaatattgttgtaatagtctgtttcaatcttaaaaagaatcaataaaaacaaacaaggggaaaaaaa

SEQ ID NO: 580 - DNA, 1206 bp, Homo sapiens
ttttttttttttagtatttataatcatttacttgtagcgaactgtttaaagttaacacttgtttaaatttttttacactatagcatttatgcaatggtttacagaattcatggagttatttttatcagtatgggaattaattaaaaccttgaatctttgttttgtctgcttctctgagcacaagcctggtcagctggtccctgcgggtcctaccagccagcttctctgtagggctctcggccgcgtccacctctgctctcccaccacaaggtcacaaactcccacgcagtcctgggtcaccccgcagctgctctggagacttggctctgggcgtctcgtggcccaagtgctccaagttggaagtttctgtgggcctcgtgtaggggatgccgtgctgggtgagcaaacctttcagccttttgatctcctttgagagttctttatgagccttcctgcagttttccagggtctcaaaccccaagctgtcaggacctccctccagctgggtgggttcattttcttctggggtctttaagtagccagcatcctcaaaaagtgtcctcagcaacttctcatggccctggggggtgatcagctcatcggccaggtcctgctctacctggtcccactgccgctgcagggcctctggcagggttgggtacactagcaaggcgtgggggtggcagacgaggggggtctcgaacgtcagcgcgtagacgcaggtgctcggctcggacacatgggccagccggttgctttttccacacgccagctccaccttgctctgccggctccgggaacggcaggcgtcaccgtccctcatccacatgcccgtgaaggtgttgttggcgatctcccactcgtgccagatgccgaggatcccactgtaggcgttccagcggaaggtctgctcgtgctgggtcacgttgtggaacgggcagaactcatacttgtacgtggactccaccaggctgaagcacttgcccgagagtcggaagagatgcacgggtccagacacgggtgaaggatccctcttggcctggaggcgactggcctgaggcaagaacgggttgttcaccccaaacgcgttgggctcctccaccaccttcatcttcgctgcacctgccggcgcgggcccgccggccgagagcccgaggagcaacaggagccgcgccagccccgccgccatcgcgccgcagcggccgc

SEQ ID NO: 581 - DNA, 1132 bp, Homo sapiens
  misc_feature (1)...(1132): n = a,t,c or g
ttttttttttttaataccattctgtgatttaaacttttctattggtgacttttagttgtataggcacggaaaggaaaatcaattgttttctttaatgctgagaatttttgttaatatttctggacatttcataaaacatcttttgttgacattctacaaatgatagcatccaataatgtcccaatactttcttcttgtgaagagagtttatatatctttttgacttctgtaatattcattatttcaggaagatttttcagagaaacctgatgaccttctacttgagatattaggtattcttgatttatttgtttttctccctcttcaatgtaaacaattagaattgaagtgtcatttgctgagataccaaattttttcaaagcctctgaaatattgttatttggggaaaggttgaaaataatttcagtagatagagttcttgtcttcatttttcccagtttgtagaggtgaactgctttgtttgctgccacaagtatctgaaatggatcaacaatcactgtaggatttatcagtgatccatcgatggtgccttccatggcctttcttctcaagtctcccgcattttttacatctttaaataacagaagggttaccctgcattcgggaaataggtccagctgatgtgttaactgcatttcacagataagcaggattctacatccggcccccagtgcgtctcggaagagctcccgctccgaaacaaagcccacaacttccggaagcgatggccaatccccgtcttcttcgagccagtttccggataggccggctcggggtggccatctgtttccgggtcctggtaggagggttgcttccgcccatggtcccgcccattcttccgcctccccaacctgggtcccgtcaacggacgcgaaggagaacaggggctgtatatcacttccggcgaaggaaatggaagaatctatgggctgggaccggaagctggggtctggttttgagtctcggctttgtcttaacctgtgttgggcgttgcaccgggcgacctcagtttcttcctgtacaaggaaaagtactgaccaaaatgagttctacatacatttccgctgctggagatttctttnntccaccggcnctcaatagtggtctcatg

SEQ ID NO: 582 - DNA, 8029 bp, Homo sapiens
ttttttttttttacagggagaggaaattctgttaattccacgtttattaatcacacagctctctgcagactagacactaaaacacacaattgtcaaaaactagaaaaatgagttatgtccacgttttaaaagcaaaactttataaatttcttaccacactcattcccaagttttatcccacaaagtatagcatgaaacaatgacaacatacatattattcaagtaaaatgctatttaaaatagctgcacacaggtaattaaaacactaggatccagtttttagaggaaaaagtcatgtggcacaatttcaagttcataattgaagttaacagtaaaacagatttgctcacatttgcttctgatctttatttctgctgtctctctttagtagaataaagaaatggcacttcacataaaatcatatttaaaagctactaaaatggataaacagatgcagatcagctctttaatgagaatccctgcatagctggaggaagttcaaggataattgttttttcaaggcaaatagactcttgttacgtggctaatttcatgtacattatcatcgctgggaagttcctgctgagaactcacggtagctatgccagaaaagtactttcttcacaggaggtgttgaaataatgccggataaatgcaagtaaggtcaatatctccctcttggtctagatcaggagctggcaaactttttctttaaggagacaagtagtaaatcttttaggctttgcaggctatactgtccctgtcccaactattcaactctgccaagaaagcagtcccagacaataccataaatgaatgggtgtggctatgctctaataacattttgtttatggacactgaaatctgaatttcatagaattttcaggtgtcatgaaatattgttcttcttttgattttctgcccaatcatttgaaaacatataaaccattcttagctcacaggttgtataaaaacaggtggcaggccaggtttgattcgtgggccatagtttgccaacccctgatctaatggtccttttctagtccatgttgtaaaatgtatatatttttaaaatcccgttacatatggctactttatttaaaaaacaacaaaaacgttcagttaaaaataattctctttcttcccacaaccaagggccattttactaaacaataagctatttcctttaattagaaaattgatcaaggatatacaatgagtctctggcctcaatttatgaacccatgagccaaatatgcaagaagactcaaaatttgccacccagccaaagaatctactggcttacaatgttaaaaatttatttggaagtattcctgcacacatctcagcatcggtaatccagagttataaaaaataatgttggagcatttgtattctttttttgaggcggagtctcgctctgtcatccaggctggagtgcagtggcgtgatctctgctcactgcaagctccgcctcctgggttcacgccattctcctgcctcagcctccagagtagctgggactacaggcacctgccaccacatccgactaattttttttgtatttttagtagagacggggtttcaccgtgttagccaggatggtctcgatctcctgatgtcgtgatctgcctgccttggcctcccaaggtgttgggattacaggcgtgagccactgtgcccagcccagcatttgtattcttaatagaaaaaggatggatacatctaaatcacaagtaattaaaatgttatataaaaccacctaaaaactacacaaataaagagaagacattaactgtcaaaatgctgagtatgtgattcttgacagggccggggcactgtcactaggagatgaatttcagctcttccttctccttgggaccttgggaatgtggctagtacactccaggccagatgctaggcagctccctgtgtgcccagggtcttgccagacctttagttactcaaccatagcttcccagtggctcaatgagggatgttaaatcctaggtggggttcaggagtaattgcatccagcactactttcattcacattttccttccacaacccagaataaccacaagatgtaagtggagtctacacagacagagatggggaaaggaaggtgcttcgtctccacctacttggccgcctaattggatttgcatctgtttaagattacggagtctttctttcaaagtgagaggcaacgccggtcatagcggcttttgttttttgtgcgttatttgaatgatgagctgtaaaaactctcattagataaaaggtgcctgaaattcaagggctcatgcctcttctacaaagtgggttggcaattacagaaattctttcccttttgggttgactgtggtgaaagtacttttgctcttttggaggtgagggagcagcaccacaccaggacagaaagaacaggctcaggtgacagccacttactcaggctcaggtcggtgggcaagtgggcactggcctcctcccatcttggcaaagccactgacagtaggcaaggaagggctgggcggtgctgctcgtaacaatggctcttgtatgtccttagaattttcatttttttgtgaagtgcttttactttctctctggctcacagtatcgcaaggagctaagtaaggcctgtatggaatctccactgtatccatgggatgggaggtgctgaacacacgcccaaggcaacaaggccactcagggaaggagccaggccatgccactgcgtgccttccatcctaccaagctgcttctgctattctttgctttacacttcagctcatttactcaaggaaatgaaatgaagtggcaaacaggacagaaatgaaaatagaattctttaagtggtaaatttgggacaataaaggcatcaattaaaatatggttcaggaatagggagaggtgctccttcgtgcctcacagaagcacggacaattctgtgctatttattgtctttgaaagagggttcactcaaacctctgccgcaacacctccagatgcacattcggtgtcttctgtgcctgagctggcagatgcccggggaggggtgctgtgcccctcacctgccctgccagtcacagtcaagggtctccttcaaggtgctctgggcccatgttctgtagcgacatgggggatggttgtgccactgcccaggcagtgatcaagcctttgtgacggcccatggggctgggcctgccttgtgctgtgcctgctctgaggcagctggggctgtggtggggatccagggcctcattctgtaaacccagtgctggttctctgggagtctgcagccacaggcacgtggcacatattggtccctagttacattaagggcaggggtaggatttgcatctgtttaagattacaaggactggatgagttctgaaaaattcataattctgaaaacctattagtttatttaaaataatggatggcatgtacctatatatgtagataagtctccttttaaatttttttaaagaaccaaagaatcctacaagcccccgtaacacacatacttgagttccagatactcatcaatgccatacttggacccctctcgcccaaggccggactgcttcactccaccaaaagggcactccacagaggaaattaatccttcgttgacgccaaccatgcccacttccagctgctctgccactctccagatctgggctgggtcttgagagtaaaaataacctgctaacccaacatcagctgcgttagcgattgctatagcctcctcctctgtatcgaacttgataactggtgccagaggcccgaaagtctcttcatgagtgcacagcatgtcctgggtgacattgcacagcagggtaggctcaaagaaattttttccaagttggtgtcgttttccacctgtcacaacggtggcacctttagaaacggcatcattcacctgtttctccaccttttctaccgctttttcattaattaatgggccctgagtagttccttcctcaaatccattacctacgcgcaggttcttcttcatggcctcggcgaatgcttttacaaaggcatcatggatgcccctttgcaccaagaattggtttgagcaaacacaagtctgtccagtgttcctaaatttagatgccatggcccctgctacagcctggtccacgttggcactgtcaaatactataaatggagcaaggccgcccagctccatagagacccttttcacagagtttgctgcgtggtgcaacaggatctttcctgtagttgttgaaccagtaaaggaaattttggacaccagaggatcagtacaaattgcctcccctacttccttggcattctttcgagaacagggaataacattgtatacacctgaaggaatcccagcctggcttgcaagcaacaatggatccaaatcaagaagaaatccctgatttacctcagccagggccagggcggagaagggcgtgtcttcggcaggcttcaccacgacagtacagccggctgccagggcggcccccaccttccgggtgatcatggcactggggaaattccacggggtgatgactgcagccacgcctatgggctgcttgaggaccagggcccgcctgtcctttgccggggtgtagataatgtctccgtaaacacggcgggcttcctcagagaaccactctaggaaaaaggcggaatagagaatttctccatgtgcctccttcagtggctttccactttcagctgtgattattctggcaaggtcatccttattttgtatcattaaattgtaccacttccgaagtaatgaactcctctccttggcggagacctccctccagcggcagaaagcctcgtaggcagcgcgcacggcggcgcgggcctctcgcaccccgcagtcggctaccatgcccagagcggcgccgctggcaggagtcttgcacggggaaggtggcggcggccgggagccagcggccgcccacgaagctgtcggtgcgcagcagcgccgcagagaggcccgccaggcgcccagcgtagcagcggagctgggccgggccgggcgcaggcccggaggcagggaccaggccgccggcgcgggggcggaggcggcagcctggaaacgtcgacccgaggcgccgggccccacagctccgcagccaaatgcaggtcgccatggcccgggcaacgacggcgacaggaaacaggttgtggcctggcctgctgatcatgttgggttctctctgccatagaggttcaccgtgtggcctttcaacacacatagaaataggacacagagctctggagtttcttcagcttcacaatgggcgtgttaactacagagagctgttactagaacaccaggatgcgtatcaggctggaatcgtgtttcctgattgtttttaccctagcatctgcaaaggaggaaaattccatgatgtgtctgagagcactcactggactccgtttcttaatgcaagcgttcattatatccgagagaactatccccttccctgggagaaggacacagagaaactggtagctttcttgtttggaattacttctcacatggcggcagatgtcagctggcatagtctgggccttgaacaaggattccttaggaccatgggagctattgattttcacggctcctattcagaggctcattcggctggtgattttggaggagatgtgttgagccagtttgaatttaattttaattaccttgcacgacgctggtatgtgccagtcaaagatctactgggaatttatgagaaactgtatggtcgaaaagtcatcaccgaaaatgtaatcgttgattgttcacatatccagttcttagaaatgtatggtgagatgctagctgtttccaagttatatcccacttactctacaaagtccccgtttttggtggaacaattccaagagtattttcttggaggactggatgatatggcattttggtccactaatatttaccatctaacaatcttcatgttggagaatgggaccagtgactgcaacctgcctgagaaccctctgttcattgcatgtggcggccagcaaaaccacacccagggctcaaaaatgcagaaaaatgattttcacagaaatttgactacatccctaactgaaagtgttgacaggaatataaactatactgaaagaggagtgttctttagtgtaaattcctggaccccggattccatgtcctttatctacaaggctttggaaaggaacataaggacaatgttcataggtggctctcagttgtcacaaaagcacgtctccagccccttagcatcttacttcttgtcatttccttatgcgaggcttggctgggcaatgacctcagctgacctcaaccaggatgggcacggtgacctcgtggtgggcgcaccaggctacagccgccccggccacatccacatcgggcgcgtgtacctcatctacggcaatgacctgggcctgccacctgttgacctggacctggacaaggaggcccacaggatccttgaaggcttccagccctcaggtcggtttggctcggccttggctgtgttggactttaacgtggacggcgtgcctgacctggccgtgggagctccctcggtgggctccgagcagctcacctacaaaggtgccgtgtatgtctactttggttccaaacaaggaggaatgtcttcttcccctaacatcaccatttcttgccaggacatctactgtaacttgggctggactctcttggctgcagatgtgaatggagacagtgaacccgatctggtcatcggctccccttttgcaccaggtggagggaagcagaagggaattgtggctgcgttttattctggccccagcctgagcgacaaagaaaaactgaacgtggaggcagccaactggacggtgagaggcgaggaagacttctcctggtttggatattcccttcacggtgtcactgtggacaacagaaccttgctgttggttgggagcccgacctggaagaatgccagcaggctgggccatttgttacacatccgagatgagaaaaagagccttgggagggtgtatggctacttcccaccaaacggccaaagctggtttaccatttctggagacaaggcaatggggaaactgggtacttccctttccagtggccacgtactgatgaatgggactctgaaacaagtgctgctggttggagcccctacgtacgatgacgtgtctaaggtggcattcctgaccgtgaccctacaccaaggcggagccactcgcatgtacgcactcacatctgacgcacagcctctgctgctcagcaccttcagcggagaccgccgcttctcccgatttggtggcgttctgcacttgagtgacctggatgatgatggcttagatgaaatcatcatggcagcccccctgaggatagcagatgtaacctctggactgattgggggagaagacggccgagtatatgtatataatggcaaagagaccacccttggtgacatgactggcaaatgcaaatcatggataactccatgtccagaagaaaaggcccaatatgtattgatttctcctgaagccagctcaaggtttgggagctccctcatcaccgtgaggtccaaggcaaagaaccaagtcgtcattgctgctggaaggagttctttgggagcccgactctccggggcacttcacgtctatagccttggctcagattgaagatttcactgcatttccccactctgcccacctctctcatgctgaatcacatccatggtgagcattttgatggacaaagtggcacatccagtggagcggtggtagatcctgatagacatggggctcctgggagtagagagacacactaacagccacaccctctggaaatctgatacagtaaatatatgactgcaccagaaatatgtgaaatagcagacattctgcttactcatgtctccttccacagtttatttcctcgcttcctttgcatctaaacctttcttctttccgaactttttgcctatagtcagacctgctgtaccacctatttcc

SEQ ID NO: 583 - DNA, 405 bp, Homo sapiens
tcgttgcgtaattcggcacgaggtctgaagatggcggcctcagcagcgcgaggtgctgcggcgctgcgtagaagtatcaatcagccggttgcttttgtgagaagaattccttggactgcggcgtcgagtcagctgaaagaacactttgcacagttcggccatgtcagaaggtgcattttaccttttgacaaggagactggctttcacagaggtttgggttgggttcagttttcttcagaagaaggacttcggaatgcactacaacaggaaaatcatattatagatggagtaaaggtccaggttcacactagaaggccaaaacttccgcaaacatctgatgatgaaaagaaagatttttgagactgcagcctattaataaagttaacataactgagaaaaaaaaaa

SEQ ID NO: 584 - DNA, 1802 bp, Homo sapiens
  misc_feature (1)...(1802): n = a,t,c or g
ttttttttttttgctacattttactttattttgttgtaaggaaaaccaattgactaagttgtccccaaaatgttagtgttcactgatcaagaaggaaatgaggtcagaaggcaaacttttcacttcttctcaaacataaattgcaagtatcacagaaaattgtaacaacacatgcaacacgggatggctttcaacacacagagagcctaagcaagaagagtgagtactgaaggtctacagaggtcagactgggagcactaccacaggaagtttgaatctatccacgcagctctttcctcccacagtccaggctcaacacctcttcctattccaaggtggcttatccatatgcagaaatccaggctgttccatatacattaatacttgcccagctgtgtttcacgaggcatctccataagccaagccccgactcaaattctgtacaggaagttcccgttgctgtcaaagaactctcggcccctctgcactactttgctgctgaagttatctggctcctctgccttcaactcctccagcttctgaccacttggcaacgcaccactgccagttcctctggggctctcagaatcactggagtacttctgcagctctcttggatgacctaggggtgcagcaacaggcacaaagctctcctccaggtcctggatttctttatttcttcccttccttctccttggtgtatttgtcctgtgagtgtctgactctatcactttcaaagctgtgctgtgatttgggtctttagatgaggcttcatgccctggcataagcaaagagcctgatacagagtggcctgcagggagcagctttgaggtatttccagagccccggaggtgctgcagcgagtgggcaagcccagctttcttaaggactttttgatcctgcttcagcttctgctccaatgtgggtaaaaacttgctttttaaaactcttcggatcacatcagtgctgacatcaaagccttcagccaacctgggaactgaccaggactctggaaattcctcatgtaaataccgtatctgctccatggcttcccacgtcagggtcctgggcggggcaccaggcgcctccatttgcctccgaattttctggaatcggattgcttgtttctgtcgtttcagggtgctgggggaagagaaccaatggcagaagccatgcgtggaagcagaatggatgtttgaagagcctcaggctaaatcatggagcgcccagccctcttctctttgatcgcaagggcaaccgggccatgttgccggcttagagctgctccgtacacccagaaagctaacacctagaacaataactgcctgtaagcatgccgaactctctaaactgatgatgaaatacgtcactaatgaagggaccagtggtcccaggggagctgaacacctgacgctgcgcccctaacaacgggtaagaagaaacaagggccgctgcgcaagcagcggcaggacacccggcgccaagggggcgcggcctggagcgccggggcacgaggccctgcttcaagctgagggcccggggagaagccggtacctctccacctcctgcagctcccgttcctccggctcccagtcggaatcggggtccggctcccggccaatagggcctgggcccgccaccccccgggtcgcgaacccacagcgagtgacggcggcgcaaacgcgcccgcccagcaagagactcagggtaaccgccatgtcgacgcaaaccagccttcagcagtcggctaccctcgtgccaagcttggcgtanaggtgttcaatacagtctcatttgccgtc

SEQ ID NO: 585 - DNA, 1106 bp, Homo sapiens
acggaagtgcaggaacatttcacaaatctacaatctgtgagtatcacatcctgtatagctgtaaacactggaataaggaagggctgatgactttcagaagatgaaggtaagtagaaaccgttgatgggactgagaaaccagagttaaaacctctttggagcttctgaggactcagctggaaccaacgggcacagttggcaacaccatcatgacatcacaacctgttcccaatgagaccatcatagtgctcccatcaaatgtcatcaacttctcccaagcagagaaacccgaacccaccaaccaggggcaggatagcctgaagaaacatctacacgcagaaatcaaagttattgggactatccagatcttgtgtggcatgatggtattgagcttggggatcattttggcatctgcttccttctctccaaattttacccaagtgacttctacactgttgaactctgcttacccattcataggaccctttttttttatcatctctggctctctatcaatcgccacagagaaaaggttaaccaagcttttggtgcatagcagcctggttggaagcattctgagtgctctgtctgccctggtgggtttcattatcctgtctgtcaaacaggccaccttaaatcctgcctcactgcagtgtgagttggacaaaaataatataccaacaagaagttatgtttcttacttttatcatgattcactttataccacggactgctatacagccaaagccagtctggctggaactctctctctgatgctgatttgcactctgctggaattctgcctagctgtgctcactgctgtgctgcggtggaaacaggcttactctgacttccctgggagtgtacttttcctgcctcacagttacattggtaattctggcatgtcctcaaaaatgactcatgactgtggatatgaagaactattgacttcttaagaaaaaagggagaaatattaatcagaaagttgattcttatgataatatggaaaagttaaccattatagaaaagcaaagcttgagtttcctaaatgtaagcttttaaagtaatgaacattaaaaaaaacccattatttcactgtcatttaaa

SEQ ID NO: 586 - DNA, 1963 bp, Homo sapiens
gggctgcctcacttctgcctgatttgggaagcgctgcaaggacaaccggctggggtccttgcgcgccgcggctcagggaggagcaccgactgcgccgcaccctgagagatggttggtgccatgtggaaggtgattgtttcgctggtcctgttgatgcctggcccctgtgatgggctgtttcgctccctatacagaagtgtttccatgccacctaagggagactcaggacagccattatttctcaccccttacattgaagctgggaagatccaaaaaggaagagaattgagtttggtcggccctttcccaggactgaacatgaagagttatgccggcttcctcaccgtgaataagacttacaacagcaacctcttcttctggttcttcccagctcagatacagccagaagatgccccagtagttctctggctacagggtgggccgggaggttcatccatgtttggactctttgtggaacatgggccttatgttgtcacaagtaacatgaccttgcgtgacagagacttcccctggaccacaacgctctccatgctttacattgacaatccagtgggcacaggcttcagttttactgatgatacccacggatatgcagtcaatgaggacgatgtagcacgggatttatacagtgcactaattcagtttttccagatatttcctgaatataaaaataatgacttttatgtcactggggagtcttatgcagggaaatatgtgccagccattgcacacctcatccattccctcaaccctgtgagagaggtgaagatcaacctgaacggaattgctattggagatggatattctgatcccgaatcaattatagggggctatgcagaattcctgtaccaaattggcttgttggatgagaagcaaaaaaagtacttccagaagcagtgccatgaatgcatagaacacatcaggaagcagaactggtttgaggcctttgaaatactggataaactactagatggcgacttaacaagtgatccttcttacttccagaatgttacaggatgtagtaattactataactttttgcggtgcacggaacctgaggatcagctttactatgtgaaatttttgtcactcccagaggtgagacaagccatccacgtggggaatcagacttttaatgatggaactatagttgaaaagtacttgcgagaagatacagtacagtcagttaagccatggttaactgaaatcatgaataattataaggttctgatctacaatggccaactggacatcatcgtggcagctgccctgacagagcgctccttgatgggcatggactggaaaggatcccaggaatacaagaaggcagaaaaaaaagtttggaagatctttaaatctgacagtgaagtggctggttacatccggcaagcgggtgacttccatcaggtaattattcgaggtggaggacatattttaccctatgaccagcctctgagagcttttgacatgattaatcgattcatttatggaaaaggatgggatccttatgttggataaactaccttcccaaaagagaacatcagaggttttcattgctgaaaagaaaatcgtaaaaacagaaaatgtcataggaataaaaaaattatcttttcatatctgcaagatttttttcatcaataaaaattatccttgaaacaagtgagcttttgtttttggggggagatgtttactacaaaattaacatgagtacatgagtaagaattacattatttaacttaaaggatgaaaggtatggatgatgtgacactgagacaagatgtataaatgaaattttagggtcttgaataggaagttttaatttcttctaagagtaagtgaaaagtgcagttgtaacaaacaaagctgtaacatctttttctgccaataacagaagtttggcatgccgcgaaggtgtttggaaatattattggataagaatagt

SEQ ID NO: 587 - DNA, 1612 bp, Homo sapiens
cccacgcgtccgcccacgcgtccgggccacacgcctcagccagccccggcaagggcctatcaggggtgggtcggggcatccgagcgggtttgacggaaggagcggcggcgacggaggaggaggatggaggcggtggtgttcgtcttctctctcctcgattgttgcgcgctcatcttcctctcggtctacttcataattacattgtctgatttagaatgtgattacattaatgctagatcatgttgctcaaaattaaacaagtgggtaattccagaattgattggccataccattgtcactgtattactgctcatgtcattgcactggttcatcttccttctcaacttacctgttgccacttggaatatatatcgatacattatggtgccgagtggtaacatgggagtgtttgatccaacagaaatacacaatcgagggcagctgaagtcacacatgaaagaagccatgatcaagcttggtttccacttgctctgcttcttcatgtatctttatagtatgatcttagctttgataaatgactgaagctggagaagccgtggttgaagtcagcctacactacagtgcacagttgaggagccagagacttcttaaatcatccttagaaccgtgaccatagcagtatatattttcctcttggaacaaaaaactatttttgctgtatttttaccatataaagtatttaaaaaacatgaattgagtttctgtagatttctagttctcaactttagcctgaacgccaacacttgaaggtgtttttcatcctctgtatgttgaaggtggttatttgtatgtaggaacaggactgccatcccagctttgcatgccaaagaaataaagaacacactttaaagggcaaactgaagagatgagcgagcaaaggtgcccttcaggtctactgaaaagttagagtacaaaacaacactgttgatctggacaaaagaagaaaaattaccctttttgcttgtgttgtgacaacttcatttaatatggtttaaagatttatgagactgtcagctaaaagtcttttcacaagaatgtcaacagagaatggcatctcaaaatatatatatttctttgcacaatttgtgaaaccttataagccattttccccaggtacaatgtagttcctgctgatagaaaggaaatattttgtcaagagctttcatttaaaagctactacctccacaatcacccccaaacccagaaaatccccactggctcttgccagtctggttttcgtattgcagttattccaattgtatttgatctccctgataacgtattttcatgggtttgggtagaagatgctaatcagattagaagcaggaatagttatttgctgtctgtgaaattgagccttttggtgcgccacgtggtgccagatcaacacttctatccctctgcactgaccacgttgtgaactgggagacccaaatgcaagccatttcatggacatagcaatatacaaccaaactctgttccttggagttatattgtaaactcttgcaggtgggagagcagttcacctccttagctctgtttgccagctcttacagggtaaaataaacctgggcaatttatcctcaaaaaa

SEQ ID NO: 588 - DNA, 1124 bp, Homo sapiens
tttttatatttttaaatattttattttcctgttctttgtgaaaacatcaataaatatcgaaacctctctgctctaacacagagggaaacactgcataattaacattaaacaaggcagtatgccttacaagaaagacataaaatgtccaagggatatttagaacattttagttcttaaagcttcaacatgagaaatgttgaccacacactgtgaaatcatttcaataaataacaactgacattcatctttacagttacaaaatagacacacatacatttccctgccgtcacattgatcttactggccattttcttggattcctcagcctctatcacagtggctgacatgtgatatgtcatcacgaagaaatattaacaaatgactagagaatatctgcaaaccttctatcttcaaattaaatatgaatcaggattgaactaacttgggtttgacctaaaataaacaataaatataatgggagagtgtgcaagtagattcaatcataaccttattttacacataaaatattaacatagaatcttctaaaacaaacaaataaataaataaataaataaataaatagaagacttctcctaagtgatgctcaaacacattaggcgcaatccaggtggcctctgcagctgtgtctctctttcctcttctgttcctgtaagggcagggcctccttcaggaacagccaccaataagcttcctccttccttctggtcagttggatttgccatttttcagcatcttttcgatgattttcttaaccatgggcgatgcggggttgagacaagctttctgcccattcttgagtgtggctatgacttcggtttgggcgcagtggggtccgggggacttcaccttcacactttggatgttcttgaggtgaattccctgcagggtctgcaagcactggcagcgcagttcagtggccaggggcgctcctgctgcgcgccggctggcggccaccaggagcaggagcagcagcgccactcgcaggagccggggattgctgggggcggcggagagcgtggcgcgggccatggggctcagcaggcggttcgagcggctgtgcgaggaggagagctggcaaggagctccgtggcccgggctctgtc

SEQ ID NO: 589 - DNA, 479 bp, Homo sapiens
ccggaattcccgggcggacgcgtgggggctgacatgagagaatcgcttgagcccaggagttcgtggctgcagtgagctatgattgtgccactgcactccagtctgggggacagaatgaaactgtctcaaaaagagtaaatgagaccccgagagttggagcagtgccccctagtacacagaaaagacagggctttgacaccccctatctctggtgttcttggccctcaacacaggaaaagaaaaaagccatccaggaggaggaggagagagaccaggccttgcaggccaaggcgagcctgaccatcccgctggtgcccgagacggaagatgaccgcaagctggcggctctgctgaagttccacaccctggactcctacgaggacaagcagaaacttaagcggaccgagatcatcagcccgttctgggttcccttttgccccggaatccgcctccaacagcaaggtcagcggcggcctgag

SEQ ID NO: 590 - DNA, 3015 bp, Homo sapiens
tgcacgccggtcgcgcgcagcatggccaccaccgccacctgcacccgtttcaccgacgactaccagctcttcgaggagcttggcaagggtgctttctctgtggtccgcaggtgtgtgaagaaaacctccacgcaggagtacgcagcaaaaatcatcaataccaagaagttgtctgcccgggatcaccagaaactagaacgtgaggctcggatatgtcgacttctgaaacatccaaacatcgtgcgcctccatgacagtatttctgaagaagggtttcactacctcgtgtttgaccttgttaccggcggggagctgtttgaagacattgtggccagagagtactacagtgaagcagatgccagccactgtatacatcagattctggagagtgttaaccacatccaccagcatgacatcgtccacagggacctgaagcctgagaacctgctgctggcgagtaaatgcaagggtgccgccgtcaagctggctgattttggcctagccatcgaagtacagggagagcagcaggcttggtttggttttgctggcaccccaggttacttgtcccctgaggtcttgaggaaagatccctatggaaaacctgtggatatctgggcctgcggggtcatcctgtatatcctcctggtgggctatcctcccttctgggatgaggatcagcacaagctgtatcagcagatcaaggctggagcctatgatttcccatcaccagaatgggacacggtaactcctgaagccaagaacttgatcaaccagatgctgaccataaacccagcaaagcgcatcacggctgaccaggctctcaagcacccgtgggtctgtcaacgatccacggtggcatccatgatgcatcgtcaggagactgtggagtgtttgcgcaagttcaatgcccggagaaaactgaagggtgccatcctcacgaccatgcttgtctccaggaacttctcagctgccaaaagcctattgaacaagaagtcggatggcggtgtcaagccacagagcaacaacaaaaacagtctcgtaagcccagcccaagagcccgcgcccttgcagacggccatggagccacaaaccactgtggtacacaacgctacagatgggatcaagggctccacagagagctgcaacaccaccacagaagatgaggacctcaaagtgcgaaaacaggagatcattaagattacagaacagctgattgaagccatcaacaatggggactttgaggcctacacgaagatttgtgatccaggcctcacttcctttgagcctgaggcccttggtaacctcgtggaggggatggatttccataagttttactttgagaatctcctgtccaagaacagcaagcctatccataccaccatcctaaacccacacgtccacgtgattggggaggacgcagcgtgcatcgcctacatccgcctcacccagtacatcgacgggcagggtcggcctcgcaccagccagtcagaagagacccgggtctggcaccgtcgggatggcaagtggctcaatgtccactatcactgctcaggggcccctgccgcaccgctgcagtgagctcagccacaggggctttaggagattccagccggaggtccaaccttcgcagccagtggctctggagggcctgagtgacagcggcagtcctgtttgtttgaggtttaaaacaattcaattacaaaagcggcagcagccaatgcacgcccctgcatgcagccctcccgcccgcccttcgtgtctgtctctgctgtaccgaggtgttttttacatttaagaaaaaaaaaaaagaaaaaaagattgtttaaaaaaaaaaggaatccataccatgatgcgttttaaaaccaccgacagcccttgggttggcaagaaggcaggagtatgtatgaggtccatcctggcatgagcagtggctcacccaccggccttgaagaggtgagcttggcctctctggtccccatggacttagggggaccaggcaagaactctgacagagctttgggggccgtgatgtgattgcagctcctgaggtggcctgcttaccccaggtctaggaatgaacttctttggaacttgcataggcgcctagaatggggctgatgagaacatcgtgaccatcagacctacttgggagagaacgcagagctcccagcctgctgtggaggcagctgagaagtggtggcctcaggactgagagcccggacgttgctgtactgtcttgtttagtgtagaagggaagagaattggtgctgcagaagtgtacccgccatgaagccgatgagaaacctcgtgttagtctgacatgcactcactcatccatttctataggatgcacaatgcatgtgggccctaatattgaggccttatccctgcagctaggagggggaggggttgttgctgctttgcttcgtgttttcttctaacctggcaaggagagagccaggccctggtcagggctcccgtgccgcctttggcggttctgtttctgtgctgatctggaccatctttgtcttgccttttcacggtagtggtccccatgctgaccctcatctgggcctgggccctctgccaagtgcccctgtgggatgggaggagtgaggcagtgggagaagaggtggtggtcgtttctatgcattcaggctgcctttggggctgcctcccttcttattcttccttgctgcacgtccatctcttttcctgtctttgagattgacctgactgctctggcaagaagaagaggtgtccttacagaggcctctttactgaccaactgaagtatagacttactgctggacaatctgcatgggcatcacccctccccgcatgtaacccaaaagaggtgtccagagccaaggcttctaccttcattgtccctctctgtgctcaaggagttccattccaggaggaagagatctataccctaaggcagataggcaaagaagataatggaggagcaattggtcatggccttggtttccctcaaaacaacgctgcaga

SEQ ID NO: 591 - DNA, 1414 bp, Homo sapiens
cggcgctgccgggtgaaatcgtaggacagtgaagatgctgctggaattgtccgaggagcataaggaacacctggccttcctgcctcaagtggacagcgcggtggtcgccgagtttgggcggattgctgtggaattcctgagacgcggcgcaaacccaaaaatctacgaaggcgccgccagaaaactcaatgtgagtagtgacactgtccagcatggtgtggaaggattaacgtatctcctcactgagagctcaaagctcatgatttctgaactggatttccaagactctgtttttgttctgggattctctgaagaattaaacaaattgttgcttcagctttatctggacaacagaaaagagatcagaacgattctgagtgaattgggcaccaagccttcccagttatcataaccttgaatggcgactagatgtacagcttgcaagtagaagtctcaggcaacagattaaaccagcagtgactataaagctacaccttaatcaaaatggagatcacaacaccaaagttctgcagacagacccagccaccctgctccatttggttcaacaactggaacaagcattggaagagatgaagacaaatcactgtaggagagttgttcgcaacatcaagtagtaccagttttaaggttttaattcatttgaatcacttatgaattgatgatatacagcaattacttttcaaaattaattttttattaattcatgatgataaatacatagtattcctcagtatctattccaagatactgaggtcataatcagaagctaagctgggtgcagtggctcatgccagttatcccagcactttgggaggccgaggtgggcaaatcatgaggtcaggagattgagaccttcctggctaacatggtgaaaccccatctctactaaaaatataaaaaattagccaggtgtggtggcacgcatctatcagagtcccagctactcaggaggctgaggcaggagaatcgcttgaacctgggaggtggaggttgcagtgagctgagattgtgccactgcactccagcctgggtgacagagtgagactccatctcaaaaataataataataataataaagtaaaaataaaaataaaaaagtaatcagaagctaaagtaaagttcctttcctggtgctaactgtggtcttcttgacacattaagatgtattttgtattttaagagtctcatgctctaccgttgggaactagccagatggccattattttgtattttaaatacataaataggattgaatcaactagaaatgaatctatatgttctgtatatatgaatgactatcttgtttttgctacttcttttgactgcttaattttattattttcatctttattgatcaaatttcccaataaaattcacaatgtaatactaaaaa

SEQ ID NO: 592 - DNA, 314 bp, Homo sapiens
ggcacgagcatctacctagcacatcgtgtggccgcgggcttgggaattggcccagttcatccaccacacatccaagaaggcagacgtggttctggcgtgtggcgactctatcgtgcatcccgaggacctgatctgctgtccgctgacggggaggagttgcctatgtgatgttcatctactctcgtctctcctagctcgtctcggtagaggttatgctgtctctctgactaatctctaggagttctgctgccacgctcgtctctgctgttgctgctcttctgttggctcttgcgtactcttcgacggcatctctg

SEQ ID NO: 593 - DNA, 2530 bp, Homo sapiens
ttttttttttttaacaataataaatctttattgagattttttaacaaaataatttttgaaaacaaaagctcccacatgtaaacaagaacgtaaataagttagatggcattattatgtacattcaagaatcaaaacatgttctggtaaacattccataatccggtaaaatgttttcacccatcactgttaagagaaactgtgtattttatactatcaataacaaaacctaatctttgaacattataaaatggtttacggaatataaactatacagtttacgtttttcattcctcctagcagatccgtggtcacatgtatactgagtcctaagatgtattttgtcagtattagcccaaaatgtccaccatcccaaattaaccaggttacacatatctcctccagtttttatggtaggatgtgttagaacccatatattacaacatcatttttcaaaactaacctaatcctaaattctattctaactagtctggcaatccttcattttatctccctgtctacacattcattagataccaaggcaatttcaccttaaaaaatactgctaatacacatttagatagtaatttctggtaaaactgtagtttatttatcaaaaaatgtgaatttttattttagaaatgtaggtcaagcattgtcatagttgtagtacttaattgagaataatggcttcaatttggaagattcaatatacacattaaacaaaattaaacagtttaaattataattcatataattataattctcatttttagatggccaaaatatattgttttcttactataaagtgttatttattcatcgtctatttttactaattatattcaattcacagtagtgacatcaaagggacaagtcatcataggtctgagaccaggaaaacctggtctgttttaacagaggcgtgtctaaaataagagtacatatttcaattaggcccacagagatagaaaagagccaggataatctttgtattgaggccttgatttcagttttaaatgtaattcttttctgccagctgaaataatttaaagatgtgcacaataggtctgtgctatttaaggcaggtgtcaagcacattttgaaatttaccaactagaatgttctcctaatggaaaaagaaaaaagaaaagttatgacagtttttgtttaagacagatgtttaaatagcactcttctttttgaccatttaaaaataatttggcagctgtaaccacctatggtcataacacataatcacttacaaaagacaagcaacagatacagaattaacgatatacttttaatatttttacaaccctctttaagttggtgcctaatggcatttaacaagatttttatattcagtgaaaaagatttagaacataaactgacatgaagtaaggaatataatttctctgtgccatgcaaaagagaagtcaactttttacacatcatcactcctaaacagttctaattaaaatccaaactgttcccatttttgcatcattgtcattctttggcaaaagattctaaaaacccaggggttaggaaacaactgttcactcatggttttccttttttttttttttgcaaaatacatgtgttttgtaaaagaaatctgcactgtgcttggtttatactacataattataagtaagcaaaatagtatgacttcttttgactaatctactcctaaagccttgagttgccgttcaatctcttcatctgagattgtagcctttgaagtagaggcagatggtaagcttcgagcagctgatggagctttggccatctttccagaaatttcaattccaatttcatcaagaacttgattcacaatatcctggctttcttcttcgtcatcagaaccgtcaaagatgtcatcaagtgtatcattgatcatttcttcagtcatttccattttcatgttttccttctggaaattctgcatggtttgtaatgtcttttgtggatccatcttcttgttaactgcctgcattgtttttgctgtggtagacattgctccagccatcttcatttgggaattcatcacttttgtttgtgtagacatagaagtaacttttgaacttacagcaaaagttctcgtcttctgtttccgtagatgcacaagttgtttggctaaaactttgcaagcttccttattaccaatcttggccattttcttaatttctaattccagctgtttttcttgtttctctaaagctgctcgatctctgattatagccctctgtgtacctcgtaactctcgattctgttcctttattacatcatccacggttttcttcttgaagagggacgccatggttaaagactgcgcccgggcggcccggctcggcccggtccggcccaacgctggcaaaggacaggaggaaaaggacaggaccttggcgggttcggggtggcggagcggagagacagcaggaggaggtcggggtcgccaggcaggacccgcggaaggcttgtatccgcagctaccgcagccgcgtcacccggagctcaggtgaccggg

SEQ ID NO: 594 - DNA, 903 bp, Homo sapiens
ttggtaatccaatttggagagtggccactgaaatcaattaaaaatgtttattctgaaagatgctactataaagtttatagactcaaatgcttataatgcttaatcaaaactaaatttacaaaaaaacctagaaacaggttgaattgaaacctgtagatcattttataatattcatgagcaacaacttttttaaagacaaaggctactgttttaatataaattaagagctttaacatgatctccctttagtgcttttaattgtcacatggctgtaaaccaaagacccctccaaattttaaatgatcactgatactacttgagcagaaattctcaggtgtcagtacttttaatgttgtgtacatcaaattacagtacaaagatgactataaacaagatgcagccctcggtttccatgaacagcacactattacagtaaaccaagtttatattccaccatcaagtgtggctctcccatgacttcgctttgtgatggatcattaagaatatcctcaaatccaatagtctcatcattacccctcaaaacatccagtgaaagatttgagcttgaaagaaatggaagacgctgaacctgctgcactgccttgaattccatctgtaattttagcggagcaaatagaccctgaatgtttctcagtgtggaaaaattcattttatcttggttgagctggaaatttttttctgataattcaaggggatgactaggcaaaagttcatttttcacacaagaaaaacctttccgaagaagatcatgactttcaaaaggtccacttgctgaaagttcagtaactggaatactgtcctttagctcagatccaagtcctctggcattcatcttccgcagctctgcgaacagcctctctgccccgttaccgtcagtcgacc

SEQ ID NO: 595 - DNA, 879 bp, Homo sapiens
ggcacgagcggcacgagccgggctcggccgacccggcggggatctaggggtgggcgacttcgcgggaccgtggcgcatgtttcctgggagttactgatcatcttctttgaagaaacatgaagttacactatgttgctgtgcttactctagccatcctgatgttcctgacatggcttccagaatcactgagctgtaacaaagcactctgtgctagtgatgtgagcaaatgcctcattcaggagctctgccagtgccggccgggagaaggcaattgctcctgctgtaaggagtgcatgctgtgtcttggggccctttgggacgagtgctgtgactgtgttggtatgtgtaatcctcgaaattatagtgacacacctccaacttcaaagagcacagtggaggagctgcatgaaccgatcccttctctcttccgggcactcacagaaggagatactcagttgaattggaacatcgtttctttccctgttgcagaagaactttcacatcatgagaatctggtttcatttttagaaactgtgaaccagccacaccaccagaatgtgtctgtccccagcaataatgttcacgcgccttattccagtgacaaaggtaactgccaacagttgactttttccattccgccccctcatgtggtctgtccatgtaatctataaaacctatataagaccatcttttggagcagccttttggttttgaatttgtatcatctttgctttcaatatttaattttttcctttttacttatttatatttgctaaaagattacctactttattattactctacaaataaccagcttttgcttttattgcttggcttagttggcttttttaatttgctttttaaaattactgtttttat

SEQ ID NO: 596 - DNA, 816 bp, Homo sapiens
ttttttttttttgagagtgacaaaaaggtttattcctgtgcttctcgcagcattaggcaggggataaaacttggagagaagggccttggtgtggaggtggagggactcctgtgggcttcactctggtaggaggagagcatcagggcaggcctttaggctgttgctctgggcagggggtgggggtgcgggggcttacagtgggggcccttagttggcacaggttcggaagggccccaggcagacatgaattctcctgagacttgaggtaggttgcttcagccagcccgggcggagaagaagggcagagagcgaacataggagtccagtcgggagcgaaagagctcactttgcacagtttggcccagcgggcacaggggattcttcaccaccagctccacatacagcgcactgtagatgtggtgcagcacatctcggatgggtcccacgcccaagtcagtattcatgacaactttgatcccagtgggcgtctcgtagtaatggagtttgtaacggctagtttggaaggccaggaagccatccttcatgtctagcggggacatcttgctgacaaacgagcggatagagaagagcatcccgtacatcagcttatactcctcctccttgggaatccctgcttgcttcttgcggtgccattcgctgtagtgcagacacactccattccggtcaaacaggtacaggttgtggacagtcatctgcagggcagggagtgtgagcctcgctccggggccgcccccactccttgggctcgggttcccggacccacagccttccaaccaggtggggaccccacccacg

SEQ ID NO: 597 - DNA, 1575 bp, Homo sapiens
tttcgtcccgcgcccggactttgccatcggcggggcagtcgcgggatgcgcccgggagccacagcctgaggccctcaggtctctgcaggtgtcgtggaggaacctagcacctgccatcctcttccccaatttgccacttccagcagctttagcccatgaggaggatgtgaccgggactgagtcaggagccctctggaagcatggagactgtggtgattgttgccataggtgtgctggccaccatctttctggcttcgtttgcagccttggtgctggtttgcaggcagcgctactgccggccgcgagacctgctgcagcgctatgattctaagcccattgtggacctcattggtgccatggagacccagtctgagccctctgagttagaactggacgatgtcgttatcaccaacccccacattgaggccattctggagaatgaagactggatcgaagatgcctcgggtctcatgtcccactgcattgccatcttgaagatttgtcacactctgacagagaagcttgttgccatgacaatgggctctggggccaagatgaagacttcagccagtgtcagcgacatcattgtggtggccaagcggatcagccccagggtggatgatgttgtgaagtcgatgtaccctccgttggaccccaaactcctggacgcacggacgactgccctgctcctgtctgtcagtcacctggtgctggtgacaaggaatgcctgccatctgacgggaggcctggactggattgaccagtctctgtcggctgctgaggagcatttggaagtccttcgagaagcagccctagcttctgagccagataaaggcctcccaggccctgaaggcttcctgcaggagcagtctgcaatttagtgcctacaggccagcagctagccatgaaggcccctgccgccatccctggatggctcagcttagccttctactttttcctatagagttagttgttctccacggctggagagttcagctgtgtgtgcatagtaaagcaggagatccccgtcagtttatgcctcttttgcagttgcaaactgtggctggtgagtggcagtctaatactacagttaggggagatgccattcactctctgcaagaggagtattgaaaactggtggactgtcagctttatttagctcacctagtgttttcaagaaaattgagccaccgtctaagaaatcaagaggtttcacattaaaattagaatttctggcctctctcgatcggtcagaatgtgtggcaattctgatctgcattttcagaagaggacaatcaattgaaactaagtaggggtttcttcttttggcaagacttgtactctctcacctggcctgtttcatttatttgtattatctgcctggtccctgaggcgtctgggtctctcctctcccttgcaggtttgggtttgaagctgaggaactacaaagttgatgatttcttttttatctttatgcctgcaattttacctagctaccactaggtggatagtaaatttatacttatgtttcaaaaaaaaatcatcaactttgtagttcctcagcttcagtcgacg

SEQ ID NO: 598 - DNA, 1166 bp, Homo sapiens
ttttttttttttacagaattccccaaactttaatgctgtgctctgaaaagggaggctggaggttgtggtgggtcacagtgttgctgacacctctggcctccagccctgcatccctaggcaccatgtgaccaggcagtgagaaggacggggcctcactcccatgccagactgctcctcgggctgagcaggacctgaagctctcagggcttccaccaaagcccagcaaacttgggggaggcctgagggggcatcagcagtccttaaaggcctgagcttgcaacactcaggcaggactcggctgagggcctctgtggtgccaccatggggtaggaggtaaagagagaccctggttccagcctgggaaccagtgggtgccctgaagggaggggaggcctcagggagttcgggacaggagtgtgcatggtactgggcggcccatgggggctcctggcctcttggttcaggcaatccctgagctggggacacattccatcttaggtccaagagacggaggtcaggagcatccctagaacgacctcccaggcacgaggaaggcccggggcagggccgggcgcagcgtggctggcttcagtaccctcgggcatcttgactcctgccctctgggactgcaaagggatctgcgggcgcctctgctgagtcaatcgtctggtaggcactacggtcctgagaagacccaaggaaaccagtgtggaccaggagctcacccccgcgctcccggtacatgtggtagacgaagcagcaggagagcggcttgagcagcaagctgaggatggccatgcccacgccaaagcggcccgtgtccgtgaggctgacccgcgggtagaagatgctgatgtgcacgatgtccaggaagatggtggccagcaagccacccagaaacatgcttatggcgtcgatggagtcccgctgagccacagcccacacgcccaaggccaggatggtgaagttggcccaggcataggagcctgagaatacaatgcagccccaggttgtcagcagccagtgacctaggagaatcaccttcaggttcacagcaggcagctccatcccgactcaggccgagggcacctgcgccgcagccgcggggggctcctaggctccgaactcggggaacaaacttgcccggccccgccccgcccgttgcg

SEQ ID NO: 599 - DNA, 716 bp, Homo sapiens
ttttttttttttgaaggaaataagaggaggttcccctcgtacgttcattctgtttatttatttgtgtgcgcacccggctccccgcagcctccacccctcccgcgtcccgctttcagaaaggaacgcggccctcagctccctccggaagaggccccggggtcaggggctgcagccgggtccccgtgcgtcggcccagctcgtccagcaccgccttctccttctggaacatctgctgccactctgcctccgtgccgtgtgtgaatcccagcaagtgacagagtccgtgggtggccgtcacagtcaggacgtcattgtaatcttcattttctttacactgatggaagatatactccactcctaggaaaatgtctcccaaattgtagtcatctggaaaatcaggctggggaaattcacctgctttcagatgctcatgaaatggaaaagaaagcacatcggttgggacatttctatctctgtagattctattaatgtgctgaatattcttgttgtcaacacagatgatccccaggtcaaatttctgcactcctaaaatcctccttacaatctcgatcttactgcgaagtggcgctctcctgatggggatgactcgctgcagatttctaatcaccaaactcatttcaggaagaataaccagccctttaaaaatgtttgcaacggaaccggtgtctggacccagcaaaggacgcgaagctggc

SEQ ID NO: 600 - DNA, 802 bp, Homo sapiens
ctccgcaatgccttggacgtcctgcatagagaggtgcccagagtcctggtcaacctcgtggacttcctgaaccccactatcatgcggcaggtgttcctgggaaacccagacaagtgcccagtgcagcaggccagcttgaaccacttggaagcaaaacagagaccctggacctgagagcagagatgcccatcacctgtcccactcagaatgagcccttcctgagaacccctcggaatagtaactacacgtaccccatcaagccagccattgagaactggggcagtgacttcctgtgtacagagtggaaggcttccaatagtgttccaacctctgtccaccagctccgaccagcagacatcaaagtggtggccgccctgggtgactctctgactacagcagtgggagctcgaccaaacaactccagtgacctacccacatcttggaggggactctcttggagcattggaggggatgggaacttggagactcacaccacactgcccaacattctgaagaagttcaacccttacctccttggcttctctaccagcacctgggaggggacagcaggactaaatgtggcagcggaaggggccagagctagggacatgccagcccaggcctgggacctggtagagcgaatgaaaaacagccccgacatcaacctggagaaagactggaagctggtcacactcttcattgggggcaacgacttgtgtcattactgtgagaatccggaggcccacttggccacggaatatgttcagcacatccaacaggccctggacatcctctctgagga

SEQ ID NO: 601 - DNA, 859 bp, Homo sapiens
  misc_feature (1)...(859): n = a,t,c or g
gtggtggaattcctctggagcaggaggcccagtggctcttctgacccaaggccccgccgtccagcttctaagtgccagatgatggaggagcgtgccaacctgatgcacatgatgaaactcagcatcaaggtgttgctccagtcggctctgagcctgggccgcagcctggatgcggaccatgcccccttgcagcagttctttgtagtgatggagcactgcctcaaacatgggctgaaagttaagaagagttttattggccaaaataaatcattctttggtcctttggagctggtggagaaactttgtccagaagcatcagatatagcgactagtgtcagaaatcttccagaattaaagacagctgtgggaagaggccgagcgtggctttatcttgcactcatgcaaaagaaactggcagattatctgaaagtgcttatagacaataaacatctcttaagcgagttctatgagcctgaggctttaatgatggaggaagaagggatggtgattgttggtctgctggtgggactcaatgttctcgatgccaatctctggcttgaaaggagaagacttggattctcaggttggagtaatagatttttccctctaccttaaggatgtgcaggatcttgatggtggcaaggagcatgaaagaattactgatgtccttgatcaaaaaaattatgtggaagaacttaaccggcacttgagctgcacagttggggatcttcaaaccaagatagatggcttggaaaagactaactcaaagcttcaagaangagtttcagctgcaacagaccgaatttgctcacttcaagaagaacagcagcagttaagagaacaaaatgaattaattcga

SEQ ID NO: 602 - DNA, 2047 bp, Homo sapiens
tcaataccgcgtccgcgcccaggcggctgcccgtgacctgcctgggcgcggggaactgaaagccggaaggggcaagacgggttcagttcgtcatggggctgtttggaaagacccaggagaagccgcccaaagaactggtcaatgagtggtcattgaagataagaaaggaaatgagagttgttgacaggcaaataagggatatccaaagagaagaagaaaaagtgaaacgatctgtgaaagatgctgccaagaagggccagaaggatgtctgcatagttctggccaaggagatgatcaggtcaaggaaggctgtgagcaagctgtatgcatccaaagcacacatgaactcagtgctcatggggatgaagaaccagctcgcggtcttgcgagtggctggttccctgcagaagagcacagaagtgatgaaggccatgcaaagtcttgtgaagattccagagattcaggccaccatgagggagttgtccaaagaaatgatgaaggctgggatcatagaggagatgttagaggacacttttgaaagcatggacgatcaggaagaaatggaggaagaagcagaaatggaaattgacagaattctctttgaaattacagcaggggccttgggcaaagcacccagtaaagtgactgatgcccttccagagccagaacctccaggagcgatggctgcctcagaggatgaggaggaggaggaagaggctctggaggccatgcagtcccggctggccacactccgcagctaggggctgcctaccccgctgggtgtgcacacactcctctcaagagctgccattttatgtgtctcttgcactacacctctgttgtgaggactaccattttggagaagggtctgtttgtctcttttcattctctgcccaggttttgggatcgcaaagggattgttcttataaaagtggcataaataaatgcatcatttttaggagtatagacagatatatcttattgtggggaggggaaagaaatccatctgctcatgaagcacttctgaaaatataggtgattgcctgaatgtcgaagactctacttttgtctataaaacactatataaatgaattttaataaatttttgctttagcacttggccccattgtagattgccctgtgcagtaaactttcaaggtgtcggctgccccagattgcttcatttgctgggtgtggaaagagttgctatggccaggcatatgggatttggaagctcagcagaagtgacttctgctctgtggttgctgctccccggctttcacagacatggtatggcagccattcttttatctatttaaccaagaggatgctggggaattgtgctgcttgtcctgttggctggtggctgcattatgtcctggggtgtgcatgtgggtctatttagagcttctgtcccttccttcccattgcaagttgcacccagatgagacagctgtagtactaggtctctttcacctctcattgcctgtccctgcttcgagctggttgtcttgtgcgtgggacatgggccttcctatctgtgttttctcaaagtcaggagctgaccaggagcacactaaggtgtggtcatgcatcataaccaacattcactcatctgggacattcttaagatacatttataaatcatttcagcagtagtactttgtatgtgttgagagtttacagagctctttgacatacgcgatcttagtctttacaaataaggaaaacagctcagtttgggaagtatcagagatgggattcaaacccagatcctctggtccaagttgtatgtgcactgaactaatcaggcaggaaaaaagcccagccactgtctcacagattgttttttgtatattgtagcaaaatcctgaaacaatggggtccttccagtctcatcatacaaaatggcaatcttggctgggtgcggtggttcatgcctataatcccagtgctttacaaggctgaggcaggaggctctcttgagaataggagttcaagaccagcctgggcaacatagcaagatcctgtctctccaaaaaaaaaa

SEQ ID NO: 603 - DNA, 1927 bp, Homo sapiens
agcggtggaattcgatcatggaacttgcactgctgtgtgggctggtggtgatggctggtgtgattccaatccagggcgggatcctgaacctgaacaagatggtcaagcaagtgactgggaaaatgcccatcctctcctactggccctacggctgtcactgcggactaggtggcagaggccaacccaaagatgccacggactggtgctgccagacccatgactgctgctatgaccacctgaagacccaggggtgcggcatctacaaggactattacagatacaacttttcccaggggaacatccactgctctgacaagggaagctggtgtgagcagcagctgtgtgcctgtgacaaggaggtggccttctgcctgaagcgcaacctggacacctaccagaagcgactgcgtttctactggcggccccactgccgggggcagacccctgggtgctagaagcccacaccctctaccctgttcctcagcatggagctctggcatccccacctcagtatctaacctgaaccagcctggcttttcaaacactccggggggaggtagtcccagcctcccccggaaccctctaccaatgccttctgaccttctgaagctttccgaatcctcccagttgaggcagtagctgtgtcctctgagggtggatgggaatcttgggagaagcccaagcaagggagccctcagaggtggtgtttggaccaaagcatcggggtgggggaggggtctgccgctgtcccccacctgctggcccccttgtccttcctcaccccctccaatatagtctcggagctacaaccgcagcagccactataaagggcaatattgatctttctgtccatgtggctctatcttttaaaacctcaaggccctccactgtcctaagataaagcctctcataggcactggggaccctgcacagtctggccatgtgaccctctccccaggcaagctctgaagtccctgcaggtggaggccatgcctgtcttaaactcagttgcatccctggtgcccaaagcaacaccagaaccaagaaggagctccataaatccttcttgggtgaagcctagacaaagccgccaggtcttgtggctccaggcaccagagccttgagtactttctcctgcctccaggcattggctcagggtgaattacaaggggctactgaatggctattactttcatcacgactgatccccacctcctcagggtcaaagggctactttctggaagtctccccaggctgactccttctccctgactgcaagggctcactccctcctccaagctcccacaatgcttcatggctctgccgcttacctagcttggcctagagtggcaaatggaacttctctgatctcccccaactagactggagcccccgaaggatggagaccatgtctgtgccatctctgtttcccctgttttcccacatactaggtgctcaattcatgcctgtgaatggcgtgagcccataatggatacacagaggttgcagcagatggtgtgggtacctcacccagatatcttccaggcccaaggcccctctccctgagtgaggccaggtgttggcagccaactgctccaatctgcctccttcccctaaatactgccctggtctagtgggagctgccttccccctgccccacctctcccaccaagaggccacctgtcactcatggccaggagagtgacaccatggagggtacaattgccagctcccccgtgtctgtgcagcattgtctgggttgaatgacactctcaaattgttcctgggatcgggctgaggccaggcctctcctggaaccacctctctgcttggtctgaccccttggcctatccagttttcctggttccctcacaggtttctccagaaagtactccctcagtaaagcatttgcacaagaaaaaaaaaa

SEQ ID NO: 604 - DNA, 630 bp, Homo sapiens
caaccccgccgccggggacatgtccaacccctgaagccggaggaacgggccagtcagactgcgcccgacaggtatattgaaaagtctgattcagttacaatcagtgtatggaatcacaagaagatccataagaaacaaggtgctggatttctccgttgtgttcgtctttttccagtgccatcaaccacctcaaagacactggttatcagaggttggatttatgcaaacttgggccaaaggacagttagaagacagtagctgaagaagcatctgtagggaatccagaaggagcattcatgaagatgttacaagcccggaagcagcacatgagcactgagctgactattgagtcggaggcgccctcagacagcagtggcatcaacttgtcaggctttgggagtgagcagctagacaccaatgacgagagtgatgttagcagcgcactaagttacatcttgccttatctctcactgagaaatctaggtgcagaatcaatattgttaccgttcactgaacagctattttcaaatgtacaagatggagataggctcctgagtattttgaaaaacaatagaaagagcccctcacagtccagccttctaggtaacaaatttaaaaacaaaatatttg

SEQ ID NO: 605 - DNA, 783 bp, Homo sapiens
tctgcctctgaccctccttctcgctgctccctttgcccatctgctcctcccacctggccatgaccaaagcccgtgctggcaccctggcccagctctgagtcctgggaccctcggtcctctctcctgggccatggccaactcaggcctccagctcctgggctacttcttggccctgggtggctgggtgggcatcattgctagcacagccctgccacagtggaagcagtcttcctacgcaggcgacgccagcatccagctgaggtccaaggtctttgtcctagaatcagagtggggaggggacagcctggggctgcccagagactgtgggtggagctgcctgctgcactcagcagtgcggtcagagaagggcttttggtcttgaagtccaggtaccatccccccttagcatacagggggaagggcctgagaggaatgtaaggaaaccagcccagatcagtcccaaggccagagtcctttgtcctacatctccctgaaccagagtgtgccctgcccctcatgctcagacctctcccaccccaaaccctctcccgggactcagtctccctggccactgcgtatcaggcttctggggaaagcatccatcacagaacctccccttccctgccacgcaccttccttggccagctccattctggcctcctccaccacctgccttgtgaccacatctcccaccacgtccccagatctcaagaacgcagctcagcttctccttcgagcttgactcttaagagggaaaagtgacggaaaccaattcagatgaag

SEQ ID NO: 606 - DNA, 2513 bp, Homo sapiens
cgacccacgcgtccggccgccgctgctacagccgccgccgccgctgttgccgcggcttgttattcttaaaatggcgccgctagacctggacaagtatgtggaaatagcgcggctgtgcaagtacctgccagagaacgacctgaagcggctatgtgactacgtttgtgacctcctcttagaagagtcaaatgttcagccagtatcaacaccagtaacagtgtgtggagatatccatggacagttttatgacctttgtgaactgttcagaactggaggtcaggttcctgacacaaactacatatttatgggtgattttgtagacagaggttactatagtttggagaccttcacttaccttcttgcattaaaggctaaatggcctgatcgtattacacttttgcgaggaaatcatgagagtagacagataacacaggtctatggattttatgatgagtgccaaaccaaatatggaaatgctaatgcctggagatactgtaccaaagtttttgacatgctcacagtagcagctttaatagatgagcagattttgtgtgtccatggtggtttatctcctgatatcaaaacactggatcaaattcgaaccatcgaacggaatcaggaaattcctcataaaggagcattttgtgatctggtttggtcagatcctgaagatgtggatacctgggctatcagtccccgaggagcaggttggctttttggagcaaaggtcacaaatgagtttgttcatatcaacaacttaaaactcatctgcagagcacatcaactagtgcacgaaggctataaatttatgtttgatgagaagctggtgacagtatggtctgctcctaattactgctatcgttgtggaaatattgcttcgatcatggtcttcaaagatgtaaatacaagagaaccaaagttattccgggcagttccagattcagaacgtgttattcctcccagaacgacaacgccatatttcctttgaggccttcgcccatcctgctgacccatttttctgccctcttcttaccccaattttcttgtattaccctctacaatatactttttattgagcactttgctgctgaaatgctgcctcttgccttttttttttttaaattttaaattatctaaatttattgttggtggggggtgtctatagcaaagtttttctatcaattttcccccatcccatccccaccctggactcatttgagaagacttgagaaatgtcttaatactcacactgctgcatgtagctcttgcttatttactggtctgggaaacaggatgtgtttcctttttttaaaagccaattgacagattacacctaaatactcctccttttgtatcattcagccttttgttttagtttggtaagttttaagaaatttcagcagcaaagttgttattcagtgggcacgatggactccaaatgcctcaagttatgtatacctgtcccagatgtaaacttcattgtcctttgttggatgatattttaaatggatataaaataaattggtctaaagggctgccctccttgttgtgtttttaaattttagttaaaaactgctacagcttatgactttgtactttaagataattgtattgatcttttttcagattccttgtattttttaataaagtaatcttaaataaaactcagataggttaagtgttagaaattttaaacagcttacattgttagcgtaaagttatcttttcttttttcctaatcagagttcttgaccctttggttattgagtttaaaacttcaattgaaattcaatagtatttatttttgaaaaaaatcactaaactgtgcctaaagaacataactgccatattaatgttttggtttatatcctctatagtaatagaaaaacatttaatacttgtaatgctgatgtgttaatttgataccagttgagtagaatgtgatcaatccagtttacaatctatcatgagtattattaactaaaatctatgtgcttttcaataggaatcattcttctcttgctgtaacacttgaccttaacttttagaaagtgttcatttttaaactgcaactggaaaggttgaaaagttaggactcttgtatttgtgaactgtaatctgaagcagattatttaaagtgtagaaaaagaaacaagttcttttttgcaaaggtctgtgataccatatttcagctttgtgtaagtaatttgaatatccaaagggttgggatgatcagttctgaatatgcaactgtccacttaataaggacaagtattccagtatctcttatgactgtagtcataaatgatgttggaatgtacattttgtgaaatagttggtatccctttactatgattaatttttgttattccaggaaatacttgtgaagccagccaattaataaagcactttagcatctgttcaggtagttttgaaaaccaacttttccccttcaggataagaacttccaggttacctaaaaatgcaataaaaatctttatagtctaagcttt

SEQ ID NO: 607 - DNA, 768 bp, Homo sapiens
gattattaaagcttcgccggagccgcggctcgtccttccactccgccagcctccgggagaggagccgcacccggccggcccggccccagccccatggacctccgagcaggggactcgtgggggatgttagcgtgcctgtgcacggtgctctggcacctccctgcagtgccagctctcaatcgcacaggggacccagggcctggcccctccatccagaaaacctatgacctcacccgctacctggagcaccaactccgcagcttggctgggacctatctgaactacctgggcccccctttcaacgagccagacttcaaccctccccgcctgggggcagagactctgcccagggccactgttgacttggaggtgtggcgaagcctcaatgacaaactgcggctgacccagaactacgaggcctacagccaccttctgtgttacttgcgtggcctcaaccgtcaggctgccactgctgagctgcgccgcagcctggcccacttctgcaccagcctccagggcctgctgggcagcattgcgggcgtcatggcagctctgggctacccactgccccagccgctgcctgggactgaacccacttggactcctggccctgcccacagtgacttcctccagaagatggacgacttctggctgctgaaggagctgcagacctggctgtggcgctcggccaaggacttcaaccggctcaagaagaagatgcagcctccagcagctgcagtcaccctgcacctgggggctcatggcttc

SEQ ID NO: 608 - DNA, 698 bp, Homo sapiens
cacagataaagataagttttactgtcatgctgcttttaacataacagagcaacatcacctaggaaaaaagtttgtaggaggatttttaatccatatatttgtcttatggctagataaagatttctctgaaaaaaagaagcatgtcaggaatctctgggtgcccctttttcctctggggacttctagcattgttgggcttggctttggttatatcactgatcttcaatatttcccactatgtggaaaagcaacgacaagataaaatgtacagctactccagtgaccacaccagggttgatgagtattatattgaagacacaccaatttatggtaacttagatgatatgatttcagaaccaatggatgaaaattgctatgaacaaatgaaagcccgaccagagaaatctgtaaataagatgcaggaagccaccccatctgcacaggcaaccaatgaaacacagatgtgctacgcctcacttgatcacagcgttaaggggaagcgtagaaagcccaggaaacagaatactcatttctcagacaaggatggagatgagcaactacatgcaatagatgccagcgtttctaagaccaccttagtagacagtttctccccagaaagccaggcagtagaggaaaacattcatgatgatcccatcagactgtttggattgatccgtgctaagagagaacctataaac

SEQ ID NO: 609 - DNA, 1256 bp, Homo sapiens
ggtggaattccacccccagcgggcgcgggccggagcacgggcacccagcatgggggtactgctcacacagaggacgctgctcagtctggtccttgcactcctgtttccaagcatggcgagcatggcggctataggcagctgctcgaaagagtaccgcgtgctccttggccagctccagaagcagacagatctcatgcaggacaccagcagactcctggacccctatatacgtatccaaggcctggatgttcctaaactgagagagcactgcagggagcgccccggggccttccccagtgaggagaccctgagggggctgggcaggcggtgcttcctgcagaccctcaatgccacactgggctgcgtcctgcacagactggccgacttagagcagcgcctccccaaggcccaggatttggagaggtctgggctgaacatcgaggacttggagaagctgcagatggcgaggccgaacatcctcgggctcaggaacaacatctactgcatggcccagctgctggacaactcagacacggctgagcccacgaaggctggccggggggcctctcagccgcccacccccacccctgcctcggatgcttttcagcgcaagctggagggctgcaggttcctgcatggctaccatcgcttcatgcactcagtggggcgggtcttcagcaagtggggggagagcccgaaccggagccggagacacagcccccaccaggccctgaggaagggggtgcgcaggaccagaccctccaggaaaggcaagagactcatgaccaggggacagctgccccggtagcctcgagagcaccccttgccggtgaaggatgcggcaggtgctctgtggatgagaggaaccatcgcaggatgacagctcccgggtccccaaacctgttcccctctgctactagccactgagaagtgcactttaagaggtgggagctgggcagacccctctacctcctccaggctgggagacagagtcaggctgttgcgctcccacctcagccccaagttccccaggcccagtggggtggccgggcgggccacgcgggaccgactttccattgattcaggggtctgatgacacaggctgactcatggccgggctgactgcccccctgccttgctccccgaggcctgccggtccttccctctcatgacttgcagggccgttgcccccagacttcctcctttccgtgtttctgaaggggaggtcacagcctgagctggcctcctatgcctca

SEQ ID NO: 610 - DNA, 417 bp, Homo sapiens
ggacttcccgggtcgacgatttcgtctcgtctggctgctcgtgctccggctgccctggcgggtgccgggccagctggaccccaccactggccggcggttctcggagcacaaactctgcgcggacgacgaatgcagcatgttaatgtaccgcggggaggctcttgaagatttcacaggcccggattgtcgttttgtgaattttaaaaaaggggatcctgtatatgtttactataaactggcacgaggatggcctgaagtttgggctggaagtgttggacgcacttttggatattttccaaaagatttaatccaggtagttcatgaatataccaaagaagagctacaagttccaacaaatgagacggattttgtttgttttgatggaggaagagatgattttcataattataatgtaga

SEQ ID NO: 611 - DNA, 886 bp, Homo sapiens
  misc_feature (1)...(886): n = a,t,c or g
tttttatttttttgctttttaaaagtttttatttcaaaaaataaagctgcagttcatttcacataaatatctggggagggaaggggagtgggatggggtgggggcttggcccctacctcctcttctctttcacactgtattgtaaaagcaaaggggatggcttgccgaaccagcgggagagccatatctgcttcattgtcatgtgatcagggagaacttcattgtcaaaaaggagctgcacatgctgagggtttagcatcaagcggtgacacaggaccctccggagatggcgtacctcagctctaacagaacatcggacatacttgttctgcaggacgcttttattcttgtctttgccagaactcagccgctccaggcacaggttcaactgctcatcatagcgatagtagtgggctttagagtggtcaaagctgctgaaggggaggccgaggttgctcagtgctggctcttccccagtgggctgggtgacccggtccaaacctcgggactggtagaattcccgaatccgtttctcttcactgtcttgcaagccaggcaccagcttatacacgatgtcctgcatgacccggtccagtttgaggttgagcagtggctgtgtctcgtggatcttaatgttgcacatggggcagtacttgctagtttggaggtacttcacaatacaactcttgcagaaagtatgaagacactctgtgatggtggtggcatccacgaagtagccggcgcataggcagcaaacaatgtgttcattcaagtctttgatcttcactcgaacctcctcctgaccctcctttcccaggggagactacacaacgtcggcgacacaacgcgcaggcggaattccaccgcntggactaatgtctacaat

SEQ ID NO: 612 - DNA, 597 bp, Homo sapiens
cgtagtaactgtggtggtattccgcccatgcggctgtagacgccatgatggatgtttttggtgtgggtttcccaagcaaggttccttggaagaagatgtctgcagaggagctggagaatcagtactgtcccagccgatgggttgtccgactgggagcagaggaagccttgaggacctactcacagataggaattgaagccaccacaagggcccgggccaccaggaagagcctgctgcatgtcccctatggagacggcgaaggggagaaagtggacatttacttccccgacgagtcgtctgaagccaccacaagggcccgggccaccaggaagagcctgctgcatgtcccctatggagacggcgaaggggagaaagtggacatttacttccccgacgagtcgtctgaagccttgcctttcttcctgttctttcacggaggatactggcagagcggaaggcaccctggaccacatggtagaccaggtgacccgcagcgttgcgtttgtccagaagcggtatccaagcaacaagctttttcctggtgagtggggtctttgacctggagcccatcgtgtatacttcacagaacgttgctcc

SEQ ID NO: 613 - DNA, 1163 bp, Homo sapiens
ccgagtcgacgatttcgtggcaggcgccagtcgcaggtgtgctgctgaggcgtgagaatggcgtcccgcggccggcgtccggagcatggcggacccccagagctgttttatgacgagacagaagcccggaaatacgttcgcaactcacggatgattgatatccagaccaggatggctgggcgagcattggagcttctttatctgccagagaataagccctgttacctgctggatattggctgtggcactgggctgagtggaagttatctgtcagatgaagggcactattgggtgggcctggatatcagccctgccatgctggatgaggctgtggaccgagagatagagggagacctgctgctgggggatatgggccagggcatcccattcaagccaggcacatttgatggttgcatcagcatttctgctgtgcagtggctctgtaatgctaacaagaagtctgaaaaccctgccaagcgcctgtactgcttttttgcttctcttttttctgttctcgtccggggatcccgagctgtcctgcagctgtaccctgagaactcagagcagttggagctgatcacaacccaggccacaaaggcaggcttctccggtggcatggtggtagactaccctaacagtgccaaagcaaagaaattctacctctgcttgttttctgggccttcgacctttataccagaggggctgagtgaaaatcaggatgaagttgaacccagggagtctgtgttcaccaatgagaggttcccattaaggatgtcgaggcggggaatggtgaggaagagtcgggcatgggtgctggagaagaaggagcggcacaggcgccagggcagggaagtcagacctgacacccagtacaccggccgcaagcgcaagccccgcttctaagtcaccacgcggttctggaaaggcacttgcctctgcacttttctatattgttcagctgacaaagtagtattttagaaaagttctaaagttataaaaatgttttctgcagtaaaaaaaaagttctctgggccgggcgtggtggctcacacctgtaatcccagcaccttgggaggctgaggtgggaggatcatttgaggccaggagtttgagacctgcctgggcaacataatgaaacttcctttccagggagaaaaaaaaaa

SEQ ID NO: 614 - DNA, 2428 bp, Homo sapiens
tttatttccatacatgtttattatatacacactgcctatagattctgtttaaataatctctaagaaaaaaatcaaacttttctgagcaggtgattaagctgaaaacaaccaattaaaaccaccactttttaagtgacctttggtcacaaatgtcaaaatgtttccacaccctttccaccctcaaacaagagacaaactgtttttgataaactctagtatttattaaattataaattttgtaatcaaaaagaaaaatgcagaccaaaaaaacctcaaactataagactagacagcaaagcctatgggaacaccatgaagtgtgttacaaacattctgaaacataagttactggctgttttcatttccatttcaataactttactataaaatagttgttattcatctattttgaaatcccaaattcacatctattcatacattaaattatgtttcctgttcataatatcaaacatctcacaggtgccaaattttagtaatggtcttatgccaatccatgcagaaaaataagacacaatgcaggagtcagatgaggaccattaatgcacagataatacaaacacactggccaaaagaactacagaagtttttaaaaagtataaagtaaacagacctcaagaaaactgggttattactaaacagctctcaactattaacacccaagttccttacattaaataaatttctcaacagagacatgttagacattttaattatgagtctatccttcccataccccttcccaccccaactcccaaaatgcactactagggatgagtataatgttatgtgggcagaaatttacaggtaaccctttcaaccttgagcatggagctgaagacatttttatttaaacttcagttactgtgcactgtccatcaggccttctagatctgacactgacactcactgttccaccccctgctactgatcgatcagttcccgatcgatctgatcgatcgggtactgtctggtttgcattagaaaccaaaagtctctgttgggtcaaggagtgctgtgcaacaactgcagatacatcctcactatcactactggcatctgattcagtttcttcaatggaggtgtctggtgctggtaccctgcctgaagatggtgattcatgatcttcttctccttctcccctatgactcctttcagctgtgttgtctccactgagttgtaaatgagcaaaagagtcttccagagaagtgcttgcatcaggggatggtgttgcagggcttgttaactgaccatctactgatgttaggggccttacagaagacactaggggctgaacagaagctccactctgtgctgatacactgtccgctccgtcagcagagctctctcttgctaggtttacggtattagcatcacagtctagcctaagtccagctactcccttctttggtatatctattatatctcgcttaatcttcctgcgacgtccatgttcatttctcctatattgaaccatgttttcaagatcagcgacatacagaaagccagcaattaacatttcagtgttctttttacctttggaaaaagcatcttccagctctctactagtgcgctcatcgtactgccaccacccatttcttccttcataataccatgcatattcaccatttcctctacttgctgccttgagttcttctggtgacaacaaggttggcttgtcaaggaaatcctcgggaatttcttgtcgacaaagagcacaccgctttccaagccatgaagctccttttacacatagatagcagaaaacgtgcttacagggcagactgactggatgaacacatgtttgcagacaaatggcacattcagggacggttaaagaaggtgcagtattagaacaggactcgttcgctttcctgtttgtaggaagcatgtttattgaatgatcaatttcaccacagccagccatcctgcaaatcagagtttacaaagctcaggtaaaaatggacaaaaaaagtgctttgtaatcactaaagcttcataaaggtaacaatcatataagaccaaaggagaaaataacatgaatattgaagatcccatttctattacagatcccacagatgcctgccacaaaaataaagcattttcttcaccagcagtcagccagcttacagtattttctcttccactgctggttcattctttgtgcggcccctgaccccgccgccgcccctctcaggccccgagcgcaaggccgacccggagtacgttgcggctggaggtgacaccgcgagctatgcctcctctccccgagtgaggatcctagagtggccggcgttcaccctgctcccccgagagggcctcgctccgactcccacctctccggccacagctgcggccacctcgcagtcttttctctctggcctcggagcccgcagctgccgggaacgcg

SEQ ID NO: 615 - DNA, 5653 bp, Homo sapiens
ttttttttttttgggtttctactgaaacttattatttgccattaagaattgcaaactatactactaagaatgaacaacattctcttcattaagcctttttcaaaacacacgagacaaagctcccctttggtcaaggtgtcccacacattcccactgcagctcccagcacagcggcgcaccatgaactcggacgcggagcccaaggaatggagatcgcaccagccttccctgcttccccaccccaactacacccaagggagaaaggatacgaggaaatacactatgtcttcaatgcttggggggctgggggtgtcctctgctaccaggtgggccggtcagtgccgactgtccggcgcgcgtcctcggggatctccggctccccgacctacacaagcagcagcagcagcagcagcgagtcctgccaacgccgcagtagctgctcatgagaaaagtgcccacgctccccaagccctcctgtttacatttcctagtggggcaaagctactttcccaggacaggcagcagagcagtggggcagagtgcactctgggacccgggacagcaggttacacagggtcaggcggtggtgggtgctggaatcggggctgaggttctggaaatgccaccaggtgatgccaccctgtggtgtctgcccaccacacaccacaagactcaagtggttttccccttttggccctaaaccacctaacacctcagcggcatgggagggcaattctcagcaaggcaaggacatggggaaggctcctgggagaggcacgccgtccaccctcaagcctgactgtcacaggtggaggccccgccccccccccgtcaccacacctggggaagctgccacagaatgccacagcactggaaagggacactctgagggcaggctccagcagcagctccaggacagccagccgcccttctgcccaggccgaccacgctgtgtcctgtgcacgccatcttcaggtttcccacacacccacttcctgaatacttttctccccaaagcaaggaggaacctcgccttcgttcctccaacctcatctcccactgaggtagcccttggtaagccaggctgggcagagaggacacagcggtgggcgcgcccccctcgagagcagcccagtccttgggcgtggggccgcagtgtggctgccgctcctctcacgccagcctgcacaggtcttctgagactgactcagggagcgccccagaaattcatgtctgtgtctgacaacttcaaacaggactttaattccaaaccaaccacagaaccggcgcctgggagcaagtgggactgaggcccaggtgctaacacggggctggcagtgtcgagagaacgctctggaagctcctaacagacggctccgcgtgcggatgcacaggccctgacgggcactctgagctgggcagtctgacaccaagcagtaaggcctcccgggcagcgcagcctcagtccacgagcacagcgggtggccctctggggggaggcagcacggggcgcagccctcggcaggcgagcgggcgggatggatgaaacgcagcggcaccaggagccccaggctctcacaggtgccacccccgaccccaggattttcaaagggacaggatttcaaagtcttcatcttctgagtcgaagaatctttccagtcgctctacatcagaagaatctagaaggaacaggacatagcgcatcaggcatcttgggtgggccacctgggtgtgagtcaagggcccttggcgtggggcagactgagcagtgcctgctctgcagcccacagacagctgtccccatgcgggtgtgaacaggtccgggggttgtgcagacctgcgaatatggggggagggagcagagaagaggagcagggcagggtgaggagggcagggggcggccggcacaatctcaggcctgaggggcctctgtcccgcgtctgaccctcgtggtcatcaggagtggttccattgccattgccttgtttgtagagtttcccacagggagacagagatgaggaggacgcgctcacggccactcacttcactgcacgagcccaggccggctcctgcggcacgctggccatggtccgaggggtctacgccacccatggccagtggtgcccaagtgaaccagtcccccacccaggactgcgtcaccacagagcctgcatgttctgtctgctccagacccctgaggactccatggtagcacgcccagctccacagcgccccggcaggcagcgctggtggggaagacgaggtgggtcctgggctgctgggcgcaagcttggaggaggggacgctccactccatacctggtctcacaggcgaaccactgccaagtgctcacggctcaggctcacacacaccttaatggtcaaaaccaagggggccaggactggggaagcaagggcacagatcgtacctccgagggaccccacctggacttggcagctctcacctagggacaggttcaggacgtcggggcaggccagatgtgaaggctgctgctccaccagctcaaacatgggcagggcacctccaagcagagacagctttttgacttgctggcaccaatcactgaagtcatcttcagtcttacagaaaaacccctaaaacgaaatgacgatgagcagaacacgacacccccatctgcagtcggataagaggtgggggcttccattcccactgccagtggcgcagcagaggcccccagcatgcaggtgctggacattccagcctgccttggctcctgtggccgggaatggagctccgagggtgccctgtgcatggtcccctgcaccagtgcccggctcccctcaggctccactgcgttgctgtgccttgattcgcccacgagatgttacgtggtgtgcatctctcaaacctcaccgagtgttccgggattggggcaggttatgagttagggccaagtggggagctcttctctctgtgactgtgagacagggccgctgggtctcagccttcgcccagcagctccctggaagcttggcggcaaaggccaccgagaactgcccaaggacaccgtgacacagggagcctcctgctgaggagccaggagacaggggaccggccaagggtcaccggcaatcacatccttaaagctgccgcctgtaatgacagtcactaggaattctcaacgctgccagatgcgcagatgttaacacaaaaagaaacgaaatggggggagaagctcaaactgggcactctcttcccctgaagacaccattctgccgcctcggcgctggtgtaggagcactctcccccggggacaggggacattcctcctcctcacgggtgaggacagttatcccaccaggtggcccctttggtctcaactcaacgttcacgcgtccactcctctgtctgcggtggctggctctctagcctgacctgactgttagagtgccaatcactgtaagccaccaagctgcgtttacagtaacaaacatacctaattctagttcgacgaggaattcgtgactaggttctggtaagaagtgtgcgccaggctgcgcgcagtggctcacgcctgtaatcccagcactttgggaggccgaggtgggtggatcatgaggtcaggagatcaagaccatcctggctaacacagtgaaaacccgtctctattaaaaatacagaaaattagccaggcgtggtggcgggtgcctgtagtcccagctaatccagaggctgaggcaggagaatggcgtgaacctgggaggcggagcttgcagtgagccgagatcgcgccactgcactccagcctgggcgacagagtgagactccgtctcaaaaacaaacaaacaaacaaaaagtgtgagccacagagctccagcccatgttccccactactgccaccctgcccaggaggtgcatggagcgtggtgtgcactctggggctgcgccacagctcagagaccgtcccatttcaggcccagatctgccttcttcctcctaaatggggcggagcatccacaacagagcccccgattcggttaactgcttccctgagcatgtcaccgtcattcatgatttctaggggggttttttggcctctttccccatcaaatatatttgagggcaggcaggtctgcataaatcacacaccaaaaatcacaactaggtaatcaaaatggaaaaacagggaagctccttcttaggaaatcccccagagaggtcaagtcagagcctccggaaaacaaaaggtggtgcaggagtgggtgggtggaggggccgcccgtgtttaaatgtgggtgtgacgaaggtggtgcaggggtgggtggaggggccgcccgtgtgtttaaatgtaggtgtgagggggacacactcaccatggctcacactcatccatgcacactcagcacgcgcccacacacgctcacatccagacacacgctctctgggccactcgaaggccatgaaggctgcacaggaggtggtgcctgggggagggacgtgagggtgcaaggacacagttccggctcttatacccttcagattcccaaccacgtgaacacagtacttatcccaacatgctgaaaaaaaaacgcaaaaatccgaaagttttcctcgtcattcccaaacagcattcagcaccaaatgcctgtgtgctcaggtggccgccacgtaccacagcgatggacgggtcaagctccgcgatgctcatgcggcacggcgggtgctggcagtggaagctctcgtccgggatgaagcagccatcagtgggctccacggctggctgcgtggtgtgggggtccaggtagatgagctcctcaccaacgtagccgatgaagtagtgggcgctgttgggcttccctccgatgacgcccagggactggggcatcatgaagcagtgcttcagcgtctccacgtaggcctcgttgatgtccgtgagccccaggcgcaggggaatgagaagtaccaggggtctccatggcgacggcctgttggtgacctcagctccggcagggaatccgttgcagtgccggtcggaatctgcaggaaacgcagtggcgcctgcacagggaacgctggtcctgcacaaccttctgatttcctccatcacaacagtgttgtccattgcaatgtggaccgccaaggagctccacgtatcgaagacagcaagcttcttcaggacctgggcgacagtgttgggcccgtaccactggcctatggacttgccttcgccaactcccatttgcgctatctggtgaatggagtagtaactgtccttcctgtcgatgaatgcgttgaggacgctgaagtagctgtctggctgcctcttcctttgtgtccacctccaatctcggcctaggtgccggcacaccagggcttgggcaaagatcatctgtccacaccgcagcatgcagccccagcctgtgtccgaggtggggcctgtccccccaatggctggaaagtttttcctgtatgtaaaccaaagtctagatgccacatcagacaagatctcgtccttttctgtgaaaatgctgtattttctacccagtatccaaacgggctctgaggtctcaggaaaatcttcaaactcagcaaaccggagagtgtcgtaggtcagagtagctgcgtccatcttcccagtccggccgccgactgacccgagcggcgtcgctcc

SEQ ID NO: 616 - DNA, 658 bp, Homo sapiens
cctttttttttttttataaatatatgtatatattttatttacattatatacatggcatatctatacagttacatttacacttgacttagagtcaaagtcatatacacacacacaggacttggactcaaagcttttaatgacaagcatgcaaaatttcttagtatagaccctaagagtacccttaatataagtatgtttatttaaaaattctatgtatctactactgttaccagggggtccttgctcccagagctcccaagatggtggtgggccacttccaagatggtggcaggccacttccaaaatggtggcaagcctcatgttctctgacctggggttcttggcctcacagattccaaggaatggaatcttgggccatgcggtgagtgttatagctctattagaagtcgtgggtcacggaagagaaccgtggaacccagtgactagtgttcagctcgattaggacaaacccaggcacttagccgtaccggaacaatggcaagcctttagcccgatcgggagtggcaatgggcgcatggctgcatcaggagcacagcggacaccctgccagatctggagggatggaagtcagtggtaggtctgcaatggtggcaaacagcagtggtggatggcgagcgaaagctcagctcgagctgta

SEQ ID NO: 617 - DNA, 381 bp, Homo sapiens
cccacgcgtccgctttcggcttctgcatgtcaccagcatcaggagtgcctggatcctctgtgggatcatatggatccttatcatggcttcctcaataatgctcctggacagtggctctgagcagaacggcagtgtcacatcatgcttagagctgaatctctataaaattgctaagctgcagaccgtgaactatattgccttggtggtgggctgcctgctgccatttttcacactcagcatctgttatctgctgatcattcgggttctgttaaaagtggaggtcccagaatcggggctgcgggtttctcacaggaaggcactgaccaccatcatcatcaccttgatcatcttcttcttgtgtttcctgccctatcacacact

SEQ ID NO: 618 - DNA, 1477 bp, Homo sapiens
gcggccgccattggctgggttcggcgcagctaacagacggcggcagtgcgagaaagccgaagatggcggtccccgcggcgctgatcctacgggagagccccagcatgaagaaagcagtgtcactgataaatgcaatagatacaggaagatttccacggttgctcactcggattcttcaaaaacttcacctgaaggctgagagcagtttcagtgaagaagaggaagaaaaacttcaagcggcattttctctagagaaacaagatcttcacctagttcttgaaacaatatcatttattttagaacaggcagtgtatcacaatgtgaagccagcagctttgcagcagcaattagagaacattcatcttagacaagacaaagctgaagcatttgtcaatacttggtcttctatgggtcaagaaacagttgaaaagttccggcagagaattctggctccctgtaagctagagactgttggatggcagcttaaccttcagatggctcactctgctcaagcaaaactaaaatctcctcaagctgtgttacaactcggagtgaacaatgaagattcaaagagcctggagaaagttcttgtggaattcagtcacaaggagttgtttgatttctataacaagctagagactatacaagcacagctggattcccttacatgatgttttcgaagactgtttttttcatcacgctcctgccacctcattattttgcattgaagatacattgccaggttgtgttttctgaaggattcagtgacttgctttctgtaaattatatggcttatcacttcttagacaaataacaaccaatagagatcattgttaagaatactgaggttctaatatactttctttagttctgtgagccaacagtaattattaagaacactttccctttaaaggaaacaaaagtgaataccatattgtttttactgtcatagtgttgctttcttgcctgtcctgcttagtttttacttgctggatgataccataatgtatcaaggagcgtccatggatacaagataagatgtgtaccttagtagaatacagagctttggtaattacatgaataaaattaagaaaatagccatatacaatcaaatacactatggcatttttatttgaatatgatgagtatattttgcttcggaaataatataggaaggaaatgtaaaatagtgagtagtatggtatcagttaattccagtctgagcttctctgtcaacttcagtttctctctcagtttaatgatttaataatagtccaggtttttgtgtgtttttctttatactgcaagttaataatgattcactttatagtttgggagacagaatcaggtcttgaataaaataattgtaatgagtgctaaatgggcaccattattcgaatcaaataccttttatattctctttccataaatacgttgatttctgtcaataaaatttttgtgtcttagaaaaaaaaaa

SEQ ID NO: 619 - DNA, 917 bp, Homo sapiens
ttttttttccacagagcaaaaattagattgaattagctttgatgtagtacttgtttaagcacagatttacgttgtcttagagagtaggagattgtatagaatctatgctcgtagtggactatatagaaactagaaatgcagttatactgatgtagtgcagtttgtgggaaatcaggaatggtgttctccagaatacatgaagattctcattgattgttgcaaggaatcacgaaagagatctttggtccaaagaaaacgtcttttgggcagcagagcaattcgctgaagttgcagtaacagatcatctcacatcccttcccatcccagaaatgatcctggacattgacatcaatctgtgtcaggtcagctactccttccggaaggttgtgacagttgtgatcttttagtatctttctgtagcaagagaggcgatttgcaggcatggcttgaactcctagcagcaaagttagcccaatggtgaaaacaagtaccatcagtttcattttggcttttggccctttttcttctttccttttggtcttggcagaggatgcttcttaaatgctcacactcactgggtgagtttgggcaaaaggagaagagaggaggtgctggaaggagcttctttacaaatgaacctttgtctgccttgtctctggcctgggatcgacagactcgctgctccagcccaggactgtggggaggaggggagtggaaggagacaaggctgcaaggactgcctcctttggaagtgttcagtttgttccaaaccaggcgagaacgaatagaacagcttctttacagagggaaataactagcctatacaagaacctcagggaggcagactctggtagcaataaaacataaaacctgagggattttaaaagaacacagcgtgatttttcccttaagaaaag

SEQ ID NO: 620 - DNA, 2676 bp, Homo sapiens
tttcgttgcagcgaaaggaaatctcgctcttccgaaagtcctccagggcgagagaggaaagggcctaggtactgtgctggggtcgcacagccggccgagacagtgccgggacggggagccaggcttccgagtgcgcccggtcactgactcctccgcgctttcctcgtgcgcctgcagcccttggttcttggaaacgccggcgccttgttcagggctggtggggctggggcgcaaggtgcagctgacaatgcccgagaggagccgcagcctctggtggagttcggtcgggtgtgggggtagtcaaggaaagaagcaaagggaatacctcctctgaaaaatggcagaagcagttttccatgccccaaagaggaaaagaagagtgtatgagacttacgagtctccattgccaatcccttttggtcaggaccatggtcctctgaaagaattcaagatattccgtgctgaaatgattaacaacaatgtgattgtgaggaatgcggaggacattgagcagctctatgggaaaggttattttggaaaaggtattctttcaagaagccgtccaagcttcacaatttcagatcctaaactggttgctaaatggaaagatatgaagacaaacatgcctatcatcacatcaaagaggtatcagcatagtgttgagtgggcagcagagctgatgcgtagacaggggcaggatgagagtacagtgcgcagaatcctcaaggattacacgaaaccgcttgagcatcctcctgtgaaaaggaatgaagaggctcaagtgcatgacaagcttaactctggaatggtttccaacatggaaggcacagcagggggagagagaccttctgtggtaaacggggactctggaaagtcaggtggtgtgggtgatccccgtgagccattaggctgcctgcaggagggctctggctgccacccaacaacagagagctttgagaaaagcgtgcgagaggatgcctcacctctgccccatgtctgttgctgcaaacaagatgctctcatcctccagcgtggccttcatcatgaagacggcagccagcacatcggcctcctgcatcctggggacagagggcctgaccatgagtacgtgctggtcgaggaagcggagtgtgccatgagcgagagggaggctgccccaaatgaggaattggtgcaaagaaacaggttaatatgcagaagaaatccatataggatctttgagtatttgcaactcagcctagaagaggcctttttcttggtctatgctctgggatgtttaagtatttactatgagaaggagcctttaacgatagtgaagctctggaaagctttcactgtagttcagcccacgttcagaaccacctacatggcctaccattactttcgaagcaagggctgggtgcccaaagtgggactcaagtacgggacagatttactgctatatcggaaaggccctccattttaccatgcaagttattctgtcattatcgagctagttgatgaccattttgaaggctctctccgcaggcctctcagttggaagtccctggctgccttgagcagagtttccgttaatgtctctaaggaacttatgctgtgctatttgattaaaccctctactatgactgacaaggaaatggagtcgccagaatgtatgaaaaggattaaagttcaggaggtgattctgagtcgatgggtttcttcacgagagaggagtgaccaagacgatctttaacaattcaacctcaaatttctaatttcaccaacaactatttattgagggctaggtaaaaagttctttttgttgtaatcgtccattaattcataagttttaaagggcatggtgctcccagcaccagaaaactatcagtgtttttaaagataaattacacaagggaggagaaagatccctgtgctaggactgcagattctatacttgcgttggcctctaactctccaatccagagcctcctgcctctggcgtcagtcttttccctcatccactcactggggagattggactagatgagtcctgagaggacacttccaacaagagacatttattctctgattttacctgaaaatggtagtagtttacatttatacagtacagtttatgaagcactttcatacgcaggcatctcttgttacctacatctaagctgttcccgaaagagtgttacagaacacaacagtattgtacaatattcgataagcatatcttcactgcacttgttataaaaatgagtggtgaaataatgtttggagacataatgaaagcgattaacatttggcaaaatataataaagcctttttgtaattggtgagaaagtcatgaagacttaagttgcctcagggcatctggtggcaagaggagggagatgggtggctgggcatggtggcccatgcctgtaatcccagcacttgggaggccttgggaggccaaggcgcatggatcgcttgagcccaggagttggagaccagcttgggcaacatggtgaaacctcctctctactaacaaaaattatccaagcattgtggcacatgcctgtaattccagctgctcaggagactgaggtaggaggatcgcttgagcccaggaggaagaggttgcagtgagcggagattgtgccactgcaatccagcctgagcaatagagcaaggtcctgtctcaaa

SEQ ID NO: 621 - DNA, 6026 bp, Homo sapiens
tggggccaataggaagatggcggagtccgtagctgccgctgagctccaggcttctgggggtccgcggcacccagtgtgtctgttggtgttgggaatggcgggatccgggaaaaccacttttgtacagaggctcacaggacacctgcatgcccaaggcactccaccgtatgtgatcaacctggatccagcagtacatgaagttccctttcctgccaatattgatattcgtgatactgtaaagtataaagaagtaatgaaacaatatggacttggacccaatggcggcatagtgacctcactcaatctctttgctaccagatttgatcaggtgatgaaatttattgagaaggcccagaacatgtccaaatatgtgttgattgacacacctggacagattgaggtattcacctggtcagcttctgggacaattatcactgaagcccttgcatcctcatttccaacagttgtcatctatgtaatggacacatcgagaagtaccaacccagtgaccttcatgtccaacatgctctatgcctgcagcatcttatacaaaaccaagctgcctttcattgtggtcatgaataaaactgacatcattgaccacagctttgcagtggaatggatgcaggattttgaggctttccaagatgccttgaatcaagagactacatacgtcagtaacctgactcgttcaatgagcctggtgttagatgagttttacagctcactcaggggggggggtgtctctgctgttctgggtactggattagatgaactctttgtgcaagttaccagtgctgccgaagaatatgaaagggagtatcgtcctgaatatgaacgtctgaaaaaatcactggccaacgcagagagccaacagcagagagaacaactggaacgccttcgaaaagatatgggttctgtagccttggatgcagggactgccaaagacagcttatctcctgtgctgcacccttctgatttgatcctgactcgaggaaccttggatgaagaggatgaggaagcagacagcgatactgatgacattgaccacagagttacagaggaaagccatgaagagccagcattccagaattttatgcaagaatcgatggcacaatactggaagagaaacaataaataggagactttagcacacttcacttgtttctagaagtccagaattttggacctccacgtgaaagaactgttcttacctctgaactgggggctcccataagggataattttcctcagagtagcaaagtttctcttattagagaaatcttgtgactcagatgaagtcagggatagaagacccttggacctggcaggttaatgctgattattccttggcctttcccttgtatttatgcaaggaaggatatactgagctgatactgttccaagcctacaacttcaagttttatcatttgaactcaagtacttttgctgctgaggaatggaatcaaaagaacgtagtctcctggtgaccacctcagatctctattattaggctagatgtatagcctctactcccccagcttcttgctcttgaccctgcactgtaagttgcccttctattagcagccaaggaaaagggaaacatgagcttatccagaacggtggcagagtctccttggcaatcaaccaacgttgctatgaaatatgcctcacactgtatagctcattataggacgtcaggtttgttgaaaaaagtgggcaagacatgattaatgaatcagaatcctgtttcattggtgacttggataaagactttttaattttaactttgctctaagactgcttgtcatgatttcaaattagaaaattatataattgcaaacagcttcacttctcctgttcaacagaggcttaaggccagatgtccaaacttgtctcaataaggaggtgatattttactaaagtttcccacgtgcacatactgactaaatacagagctaggcccagtttgtattgtactctgaacttaatgcaaagtctccttggtgattttcgcaaagtccgtggatttgggtcagaggcacatttcatacataacagcccttataaacgtttgccctgcctccacattttacagtatcttaaaacagtacatttctttcaaagaattttatctctatgagtcagtactccaacttaggggggtcccacattggtgggaccaggaggcatcagcatcaaccgggggaattggttcaacttacctcttataacctatgaactcagaaaccctgggggtgggctgagcagtctgttttagaaagccctccatgtgattctgatgcatagtagcctatgacataattccagaccaggtgaatctcaagatactaatcctcacatcatttgccttctcatatttccctcgtcttgaccatctggtgcctgttatgcagtttaacattctgcagcaataaaagtgttttattataaagtattaattttaatgttctatacttagtgggaaccactggtctcaaaatttgaagctattctttaagaggagaacattcgcaaaactcaagcatacttggtttttctctgtagtacttttgaatgctttatcttccttacagaataacttgtcttccttatgcttcaagctccaaaagggtaaggaagaagtcttaatcatttttgtattccttgcacaggacctagcaaataattggtactcaatgtttgctggatgaatgaactaaattcccatacggccactttatggaaactaactgcctaatcgccactttcattataaacaaaggaaaatgaagataagactgcaacagaggccaggtgcagtggctcacgcctgtaatccccagcactttgggagcccgaggcgggcagatcacttgaggtcaggagttttgagaccagcctggcccaacacggtgaaacctcatctctactaaaaatgcaaaaattagctgggtgtggtggcatgtgcgtgtaatcccagctactcaggtggctgaggcaggagaatcgcccgaacctgggaggcagaggttgcagtgagtcgaaattgcaccattgcactccagcctgggtgacagagcaagactccatctcaaaaataaataaataaataaataaatttaaaaaaagactgtgacagaaagggtttagagaaatgtgctaaagagttacaattggcaaatttaaaattatatgttaaactataacctcatttgtatcatattcatttattctcaatacctgggacatttaaggcattcaataatgaattaaagctgtgccttattttggtctgcattaaaggagtggtctaaattttacaagatatattttgcatcagaaaatcaaacttcagcagtttaacatgctggcatccatcaccaaggcatgaagcaacacatttgctaatgattcctaatcactacagtgctacatcatttacttaataaatactgattcagtacttatatatacagatagtctgatggatgagtaaccacagtgatgttgttcaggacatgatgtaaagttgaaaggtgcatattgctatgttttaaaggctgcctttacagtagaagcagcaaagtgtgcttaatggactgctgtcctctgatgaccaagcaaatgcaacaaatgaaatatgcacaaggctgtccttggacagtacttgtttgctttgctcacaaaggagaaaaggaaagaaacaattgaaaatatgtatatggtgaaagtatgtgagtccgagcagaaataacaaaggcaaaaggatgaggagagatggagtaagtctagagaagaaaataaatggatgagatagagagctgtctaagcaaaaaaggtgtcagacctctgatcttataaataagacacttcaaaagtagcaaaaacagttttaagaaggtgactaatagataaggtgtgttgtgtttagctatttcctgttaggtattagtaatgggttcccaatgacctgagccaaaaatgaatcaagttaaatgaaaactgacatctgatatgagcatatattattagtctattcaagcacagttttgaagttagcaaacatctaaatcctcacatctctacaaggtaggtcaaagtatgattcttctcagttgtacaagataaatggctgtataacatgtctagtcatagttaagacaacaattggggacagtgctttggtctgattgccatgccagcatcatattttatctgtgaagggtggcttggttgtggaaaactataaaaactggatgcaaaagtaaaatgcaaccttgtttggtgacgtccagttcctctggaattaggaaaaaccacttgtgtttaagaacaggagtcaaatcaatttttaaggaaacagattctaatacaaaaaccttttctgttgggtctagtaggtctggacaaaacatctccctcttttccttttatattttcctcatcctcttcttgcagcgctggttgaaaacaggggaggaccccatgaggctgtcagtggagtgggaaccatagctgctatctgagtcatcagggctctgaggaatcccagcttcactcatgcctgacataggctcctcgaagacatcactgcccagcacaccatgcccagagacattgccttcttcactttcttgaggctccattttcacatgggccagattccaaagaggagaagcatttacctctgcacttgaagcctgtggtgaagcttcaacctccaggttagatgggaagcgttcgctctgagccccaagcactcccataggcagtgactggtctccagaagcaaggtcagcctccagctcctcactgacaggaaaagtgatgtcgctcacaggttcctccttgatcttcacaggtttagcgtcctctgtggccttctcaggattgacaatcctttcatattcttcagagagttgcttactaatctgtagcatgtaactgtgatagtccttgatgcggtgctgccagaacttctggagggagagcacactgccaatacccacttcatggaatacctgctccatcacatcaggaaaaggagtctgtcccagccgggcctcccggtccacagcaaaacgcagcaacttggtaaacttaaggcaatactcatgtgccacatcagttagggtctccaggacactctcattagcacagtcaaagcccgcgtgggccaggattgtggccactgcctggtagaggagctgccgacaggagtgccagctgagttcagtcacaggttcccctttcccacgataaaagtcactctctgggtcactgtgccggatctggaatggtgcattgggattcttacaatctaaaggcaggaggtcatcagggagaggaggtgacccagggcacgagggaagaggttcactctcttcagtttttacaccttctgtctgctgctgattctgggcctgagctgtggcaataaggttgcgaagacgtcggttgtgctgaatcaactgaatcgtatggatggtgagactacatggctctgaggggatgtccagcatagtggggggcttcggcttgttggctgagggttggtgcaggggtgggtcatggacttccaccagacggaactcccgtgggagcaaatcgaaggaacttctgttggtctggcttgatgatattggtatctctccccagtatctttgcagattcattgtccatatgtctcttcaagttcaacaaacatttatcaaatgccaggcattctgtgtcggtcaaagactgataatgtgagatccttgcctttaccgaaaggagcacgaagaacaggcacggagcccaaggaatgcccaagtccctccaggggtttcctcggtcacggtccgccggcgcaggcgccaatcacagggtcctgaggtcgcctgacgttcagggcagccggaagacggggaggtctggacctgaaccgagacaaggaggtaccacactattcactgctgcgtcgcagagcgggctgggcggctgtctggacctcgagaggcctgaggcaaggatcgcgtcag

SEQ ID NO: 622 - DNA, 676 bp, Homo sapiens
ttttttttttttgaagagagcagattctctttattgagatacgggacacagcgaagggtggagagacggaacagccccccagcctcagccctctccacgggggccggatgccagagatgggagaagggattcagtctctcgcccgggaaacccagtcccacagagggcgccggcaagggtgggacgcgacctgggtgacacggtgcagggagtctttaaatagaggaggggctggagcggggaaacgcgccggggccctagcgcaccatgtattccttgcgcttattgagccgaacttggcagaaagagaagcctccgaggaggaggtaaaggcctgcagcgatgaaacagttgtagctgacttgctcgtaaaggttgtatatgttctgggggccattctcaaaatctttctccgtgaagggaacgtcctcaatcaacacagcggaatggacattgaaaaatattccgagcattatcaacatgatcactccccaggcgctgaggacgatgccgcaggcggccagcttcggcccacagcacaggagcgacgccataaagaagggagtcggggatcgccgaggtgcaagcgggctcggaaagcggtgggagaaagcccaggatgccctcgcccacgcgtccgcccacgcgtccgcccacgcgtccgcccacgcgtccg

SEQ ID NO: 623 - DNA, 1080 bp, Homo sapiens
ttttttttttttcaattataaattttatttaagaatactgacttaacacaggaaacagatttaattcatggaattgtgcatatggtcatccgttacattgtgacatgttaatttttttttatcatttattggcactgtcaacagattacttgtgaacaagatcactttgtacgcttaagtctgcgatgctacttagctatggttttctaccatgagcttatatatagataggtgtaggtatgtagatacattaatgctatacacaattttgcatggttactgagcgtcagtaaaaattatgaaaaaacacccatttataataaaagtgaggatgtactaagacttgctattactggaccttgttttctgtaaaagtgatgacacttgctggacggttactaaactctatggcactaatgtatgatggattcatttccagactgtcggccacggaagcacttcttcatggcctctgccctggacagcagcctgtcctccgggctccccatgtttttaccagcttctgctgagtttctacaatcttgagctctgctgagaattcttttccttgaaattcttctacctaaagccccagcccccaaaagagcatgtctcaggaactcattatgccctgagtcaacaagaacttgttgataaatggcttaaaagtttttacaagaagtaacttcccttggtaaggagtaaataatagctctggaattttccagataaaactatttcatttctctgtcagtgccccatggggagagaacgaaatattggagcccctctccctaccaaagagagccacttttctggttgtgccctggcttaaaaccctttggtctccgagaaccatactgaatatttgcacccaatgctaaagttttcaggagaaagcatacttaagccaataaatgaataatggtttggtttgcattttgcttgcttgttaaataaggccttattgaaccttgggatgctgcctgtggaaactggcttccccagtgaaagatgtgatgccatgaactgatatgcctttgcatatgctgttccctctctgcaacaccctctcgtgcc

SEQ ID NO: 624 - DNA, 1056 bp, Homo sapiens
ttttttttttttggagagaaggataagccatttattaaccccacgcccctagcaccagctgtcaccttggacttgttggagatgcaggggctagaaaggaaatgacagagtgtacaggccccttcgaccccgtgtcccataggtggtggcccccagacacaccctctctgctggcagtgcagaacatgcatcccaataccctagaggagaaacaccaccccagggagagccctttctgctccaacctcctgggcaggtcccaggttggggcagcagccatctgcaggtgtttgtcaggcctggccacacatgcggacagaggatacgactggggtaccctagggtgtggggagggtcggcctggggtcagggggcatgaaggctgtgttccagactcctcctgcccccaatcctctgtgcccctgctggagctctcctagcttctctgatctgtgctcctgtctttggggagctgcccggtctccaggaagagccagaggttgttgcatttctccgactccactctcgtcaccccgtagctgaccacagagcctgcaaccacggccactaggaggctccactgcaaagggtatggaaacttcctctgaatgaacatctgcaagccaaaggccatgccggtgcctgtgacgaaggtgaaaacgcccttcatgaaggcgtgtgactggcatgcggcatactccccgagtccctggggtggcagaggcgggtgaaggctcgatcccctgccctcttccttcaccgcctctcctgtccctcctctgggcacaccctggctgtggaggagtgagaccctgggcgcttggacacgtcccacctcccctatgcccacccggacgccctgagccccttagcaagagagtgcccccagcctccgccactcttccctgacgagggcacccccacgccccggccccccgcctcgctcaggtcagcttctggggtttgaggcccgcgtcccagaccggccttctcaccgggtgcttggcagccacggcgtcctccacccgggacagacccaagttcaccatggttggc

SEQ ID NO: 625 - DNA, 583 bp, Homo sapiens
ggcacgagcgagctgttgtgcatccagaggtggaattggggcccggcattccctcctcgtcccgggctggcccttgcccccaccctgcaactcctggttgagatgggctcagccaagagcgtcccagtcacaccagcgcggcctccgccgcacaacaagcatctggctcgagtggcggacccccgttcacctagtgctggcatcctgcgcactcccatccaggtggagagctctccacagccaggcctaccagcaggggagcaactggagggtcttaaacatgcccaggactcagatccccgctctccattggggaagaactgagggcacgggtggcaagtgggtcagggatcagacctgggcagcccacagcctctcccgccctctgcctcccacctgacagctccagggcaagccgctgctctcagcctccctgcctgtcccttccttggtttggggtgagaagcagccctgccaacacataccacgtgccagtgacttccctatgcccctcgcccgctctgcactatacagcgctgcaggcaggcatcatttccacgtcgcaggcaagagcaccaaggct

SEQ ID NO: 626 - DNA, 380 bp, Homo sapiens
atcgagcatggctgcccccacggatgacggcctgaccactgctgctcccacgctttatcgacattccctgccttctgtgctatcttacccaggtcaccccagacgacatgtacgccaaggcctttctgatcaagcccaacacggccatcaccgggactgacaggagaaagctctcgagctgatgagacaacagatttcccacacccttggaactgatcaaatctatgagttattacctggaaaggacgagctcaacatcgtgaaatcgaatgctcacaaacgggatgcatagactgcgtacgtgagtggagaaaaccacatactttctgaaccgtagaaaaacctgtatccagcagtgaacacgctgagctcctatccct

SEQ ID NO: 627 - DNA, 1906 bp, Homo sapiens
ccacgctgttacaaaggggacatcatgggctgtggaatcatgttcccccgggactacattttggacagtgagggggacagtgatgacagttgtgacacagtgatcctgtctccgactgcccgggccgtccggaacgtgcggaatgtcatgtacctgcaccaggaaggggaagaggaagaggaggaagaggaagaggaagaggatggggaagagatagagccggagcatgagggcaggaaggtggtggttttcttcactcggaatggcaagatcattgggaagaaggatgctgttgttccttctggaggcttcttccccaccattggaatgctgagctgcggggagaaagtcaaagtagatctgcaccccttgagtggctagggcctcccctccagacctgctccttctccctgctcaccctctgctgggccaggcacccagttcctgacttcccagaggcttcgtttacccagcaggcccctggaggtgtgtagtcactctgcccccactggctcaggcccctgtcacgcttctctgtgcccacgtttctgacctggtgctgccactgttgtcagtccctgggcctgagtccctggttggacaggaatggacccaaagaatggtgttggtatgtgggtggtcccactcgctttggtcagtgggcttctgggtccccctttccctcaccggccctgtgtgggtggagaggcgtgagcaccctatctcagctgctattcgggcatgatgctttgtagagggtagagtagacagccccctcccctactcaccatggtatttctccttgaattcctctttcttgttttctttcctggttgtgtgaaccagttgctgctgtcatacccctggcagggccaggggacctctctttggtcatctctgtcctttcactggctgctgccccaggaagactcctctaggctctccatctttcccttgagagctggctccccaccccaacctgctcaggcaccacagaggatctaggtctctggctccccatacctggacccacatgggtgggtgcctgttgcatgtttaagagagaggggctgtgaggtgacagggcactagggccttcactcctttctccccttccatcctttctttaccagtgccacccatgtccctagctcccgggtattggggctgaggctctggggcctgtctccctgccagcgtgagggcaagaccccagagccttagctgagcaagcccagaggggcagcgtggcccctccctccccttttcctgccccgtcccatgcctcagcttgctgcttgtgccagttgcctgtttcgcttcagtgtttgattctagcacttacatgtgtcctccccaccaagccctctatctccttctaatccttcaacccctggccccctccccgtaacagtgacttttccagggaggaagaggcagcaggagctgttggccttggtttgcacagagcgggtagggctgtagggaaagcgggtgagctgttgtgctgctgggcctccctttggccctcgcttcccaccctacgatgtatgaaatgtatgtacagaccagagatgtttatacagccgataaagatggagtttccgtatttatcagtatggccggaaccaggagcctttctagtccactgggctaggaacaggactgctggatgggggcagccgaaggcagcttgctcatggggagatgtggaccaatgttgggccagggatgggaatcatatgttccatgggcctggctacaggcctgagcacagatacgtcccctgggagatgaggctttgaccttcctgtgaataagtgttgactccaatttcggctaaagtttatagaaattctttattattagacaaaaatagactctcttttttcccctaaaaaaaaaa

SEQ ID NO: 628 - DNA, 1775 bp, Homo sapiens
ggtggttcagggggcgtgtaacctgggccgattctgccccagcacactggttgtcgggagccccgcctccgctcgcggttgacagctcagctggtgccgagcaactcgtgccagccagtcgtgtctcagcctggagagtgcgcgcaccgccgcccgggcagccgctggctccagctcacgaaacagccccgggcgccgcgccgctctgagtccagcctcctactgagaacagtccctcccttgtgcgggtcgcacggctagccgcaggttcggccacgtcaaatccattttctaaaaaagcagggagcagagctctctcttcgccgccgacgcagaaaggagctggggaggaaaaagctgctgccttttgcgctggagattcgtgggcaaggcttctcattttcccaggctgcttcccctcccgggtgaggagcgtcctgagactaaggaaagagcctggaaaatggagcagacctggacgagagattattttgcagaggatgatggggagatggtacccagaacgagtcacacagcagttctgtttcattgacagcttttcttagtgacactaaagatcgaggccctccagtgcagtcacagatctggagaagtggtgaaaaggtcccgtttgtgcagacatattccttgagagcatttgagaaaccccctcaggtacagacccaggctcttcgagactttgagaagcacctcaatgacctgaagaaggagaacttcagcctcaagctgctcatctacttcctggaggagcgcatgcaacagaagtatgaggccagccgggaggacatctacaagcggaacactgagctgaaggttgaagtggagagcttgaaacgagaactccaggacaagaaacagcatctggataaaacatgggctgatgtggagaatctcaacagtcagaatgaagctgagctccgacgccagtttgaggagcgacagcaggagatggagcatgtttatgagctcttggagaataagatgcagcttctgcaggaggaatccaggctagcaaagaatgaagctgcgcggatggcagctctggtggaagcagagaaggagtgtaacctggagctctcagagaaactgaagggagtcaccaaaaactgggaagatgtaccaggagaccaggtcaagcccgaccaatacactgaggccctggcccagagggacaagtaggtgccttcggtgctctttttgtcgcttgtcttttgcccattctcaaggcatacagcagctgtcctgttccctttcaaggactgacagtaggagcttcactatttctaagactttatgggcccacaaccgaagacattcttttcagggttgaattttcagtggtatccattatgaaaactcacttcatggattcagtgggcaaatagcggcaagcaagagacatggattcacttattcggcaaacatttactgggcatgccacatgccagataccgggctaagtatctggcatgtgttacagaaacaaaagacctaaatcttgtcaccaagaaacatgttacatgattttaataagttccctgatagaagagcatggggtgctctggggaaatattggagggtcatccattccacattaaaagagcaagttgtctgctgtggtctgaatgtttgtgtcccatccccacctccctcccccaccagtttatatgttgaaatcttaacccttaaggttaatacttctgcctccagaagtattatgaggtggagccattaggaggtgattaaatcataga

SEQ ID NO: 629 - DNA, 1114 bp, Homo sapiens
gcggccgctgctgaggcggagactccccgccgccgcttcctccatccccagtccgccggcctcgcggcgctgcagggcggttgcgcgcagagctcttccctcctcctttttcttcctcctcctcctcctcctccgggtccccgcccagcacccctcgcaccaggcggcggcggcggaggaggagagctagacccgccgccggggcacaacatggcggagccctcggccccggagagcaagcacaagtcgtccctcaactcgtccccgtggagtggcctcatggccctgggaaacagccggcacggccaccacgggcccggggcccagtgcgcgcacaaggcggcgggcggcgcggcgccgccgaagccggccccggcggcgtgctcacggggggctgtcgcagccggctgggtggcagtcgcttctctccttcaccatcctcttcctggcctggcttgccggcttcagctcgcgcctcttcgccgtcatccgcttcgaaagcatcatccacgagttcgacccgtggtttaactatagatcaacacatcatcttgcatctcatgggttctatgaatttttaaattggtttgatgaaagagcatggtatccactaggaagaatagtaggtggtactgtttacccagggttgatgataaccgctggccttattcattggattttaaatacattgaacataactgttcacataagagacgtatgtgtgttccttgcaccaacttttagcggccttacatctatatctactttcctgcttacaagagaactttggaaccaaggagcaggacttttagctgcttgttttattgctattgtaccaggctacatatctcggtcagtagctggatcctttgataatgaaggcattgctatttttgcacttcagttcacatactatttatgggtaaaatctgtaaaaactgggtcagttttttggacaatgtgctgctgcttatcctatttctatatggtctctgcttggggtggttatgtatttatcatcaatcttattccactgcatgcatttgtgttggtactgatgcagatacagcaaaagagtctacatatgatatagcactttctacattgtgggttt

SEQ ID NO: 630 - DNA, 851 bp, Homo sapiens
ttttttttttttcagaatccaaaaggactttattttctggcactgggaggcgccctgaggccacagccttttcccagggctgctggcagggtcccagggctgctggcagggtcccagggctgctggcaggggttgtggtcctgttgagcagaggagcgacgccgctgccctggcccccgctgtccctatgatcctgcactctggggtgggagctacatatcatccttggacaccaggcagtagaagtctgtgcgggcactgtagtttcgcgagccgagatccgagacgtccacttcgctgctccggctctctcccagcgagaccccactggtgtgcggtggagctgatggctctccaaaaacaggcccccggacacccaggtcgccctcagggtccgggtccacctctgagtccagggcccggccctcagggactcggcctcgaagaatcagcatggggtccttgtcgtcctgcagctgcgtctgggggtctccttccaccggcctgtaccgcaccttccgcggcagcgccagctgcacttctttccaaaaatcggaggaaggagtcacggagccgggcctccagagcagcaaggtcaccaggtggcggtgctggcgcagcaggcggagcgccgggtgcgcggggtcgcgcctctggccctcgaaggtgatgaagatgggtctgcgggtgagctccagcagccggcacaggccctccctgcggggcgggaccgtcaggggggtgggtgctacgctggggcccacccaaccccgcgcgggacccaccggaagctgtggctgcaccaggcccggctcaggaaggcgtccgaaagcaccacgatgaggcgtcgg

SEQ ID NO: 631 - DNA, 1320 bp, Homo sapiens
actcgtgccgtggaattcctgcattaaagaaaaagctcctggaggactcctgaagcctgaggcagccttggggcagcagtggctcatggtttacattggaaagacggtgcctcccatcattctagcccctcactgcctggggagctggaggcttaaatgcctgagaggagtgaggtgttgaagaattgcctgcatcccagggatggagcgtggtggaagaccaactcagtgcctcacaggggtaattgagtcatgaggggtggagaagagggcgagagggagagaggataaatagcagcgtggcttccctggctcctctctgcatccttcccgaccttcccagcaatatgcatcttgcacgtctggtcggctcctgctccctccttctgctactgggggccctgtctggatgggcggccagcgatgaccccattgagaaggtcattgaagggatcaaccgagggctgagcaatgcagagagagaggtgggcaaggccctggatggcatcaacagtggaatcacgcatgccggaagggaagtggagaaggttttcaacggacttagcaacatggggagccacaccggcaaggagttggacaaaggcgtccaggggctcaaccacggcatggacaaggttgcccatgagatcaaccatggtattggacaagcaggaaaggaagcagagaagcttggccatggggtcaacaacgctgctggacaggccgggaaggaagcagacaaagcggtccaagggttccacactggggtccaccaggctgggaaggaagcagagaaacttggccaaggggtcaaccatgctgctgaccaggctggaaaggaagtggagaagcttggccaaggtgcccaccatgctgctggccaggccgggaaggagctgcagaatgctcataatggggtcaaccaagccagcaaggaggccaaccagctgctgaatggcaaccatcaaagcggatcttccagccatcaaggaggggccacaaccacgccgttagcctctggggcctcggtcaacacgcctttcatcaaccttcccgccctgtggaggagcgtcgccaacatcatgccctaaactggcatccggccttgctgggagaataatgtcgccgttgtcacatcagctgacatgacctggaggggttgggggtgggggacaggtttctgaaatccctgaagggggttgtactgggatttgtgaataaacttgatacactaaaaaaaaaaaaaagggggggccgttttaaaggatccaagtttacttccccgggcatgcgaggttatagtttttttatagggccacg

SEQ ID NO: 632 - DNA, 3149 bp, Homo sapiens
cacttgattgcagagaaggtctacagagcagtggttagaacttggccctgaggacagagcttttgctccgtatgaggctggcaggtaacgatcttctcagttttctcccaggaattctggaacgatgaaggtgatgattgtgcctgtggccaagaccgggagaaccctggatccctacaccttccccacccctggaatgtcactatacatatctgacttcttctgatgttgcctttgaccctaaagtcaatatgataaagtaacaagaagctgggacagaggaacaaacacagcccactcaagcagtggtggcaacattctgttagaaaggaggggagtcaaagaaaaaaacacccctccgcccatctccttatcacctccctaaagacagaggagaacatggacaccctccatcctgatagacatgccatgtggtcagtttgtgcggtaaacaggaaaaaaaaaaaacctaaagatattgtagacctttattttctttaaatctcctaataaaaacattaaactttcaagaagattccaaactgacattgcatagaccaactcctttccaaaaatatctctgatatactctccaactctctcaatatatagaatttgaagtccaggagctgtgggcacctggtgggaattcactgagctcaaggggacaagagggctgaggacagggctcccacatggggacaaggccaggctttctggcctctggttccagccagcatcaatttggttgtggccaaattctcagtccaatcaccctggcccagggcctggcgtgggaggatgtggcaggctctgtctccttctggggttcctggtctggaggagtctccccaacagcgccaaagctggctgttttccgcccaaagccccagaactttgaatgagaggcaaatctaccctgaatgcacctccctcctaggctgggtgaggtcacgcagacacagaagggcaggacagaactccccatcttctgggggccaattcgtctggacactgtgcggtcagcttcctttttaaagtgccagtatcggtggggcaggaagggactctcagggctgagcagagccttctccagcgcgagcaaacactctgtcccgcctcggcaggcaccttctaacattcattttctaagggttaggtgagtaaaacaacaacaacaaatgctggaaatgctctgttcccaatgccagggagttccaagaccaagaagcccaactctcaccagcgggggcagatggggagctagggaaggaaccctcccagcctggggagggcacctgcacccctcccagagagagaagcccccatcccggccccccagctgggccccagcgctgctggaaccagccggcaggtggggcagaaaagcagcacctcccctcaccagggcgaggaggcaatattgaaccgtgaactcaagaagaaagacggaaagaaaaaatgaaaaaagctacagggctaagtaaacaccagcctgctgggtttatacaaaatgagtgaaatttaaaaggggcaggagagtttgtccagggactggctggcagccagaacccaccttcaagcaagttacaaggacttgggggaaagtgctgagagcagaggctttagtagggggcagggccagactgctccccactgggaaagcacaccccttaaaggagcccttcccccttgcccagaacgggggatgcttccagaggaaggctgaggcttttctggtaaggaagccagctccggaccagtccagccacagcccacctgcctctatggcatccgccccagtctgggcagctgaccctgagggcagagaaggactttgcttgctccaaccttcctgcaggaaaaccagctgctcaggacccagccctgggcagagggcacggtcggtgctcagacctttctcagcacgggtctcagacctgagctggagctaactggaggaagaggcagcacccgttcccgccgggctgctggaccctgggcctctgactgcacagcaggcagtgaccaggagtccttgggaaggagctcagggaaggggaggtgaggggccagtgggactgtgctgggggtgagcatgtgcaaagtgcaggctgcaaggcagcgggaggacatttgccggggggaggcaggggtctcgatctggagtgtgggtggggtctgaggtcatggctcccaggaagaggccgccagcaggtcccccaggacacaaggaagggacagctgaagcactaagcagtcagacagtcacaggtggcaggattccggaggcggtctggcccccccaccaccagggcaagggaacaacggagcaaggccctgctgctaagacgtgaccaaagccagtgctcctggagtgagtggggacacaggtagagaggccccctcagccacaggcatctctacatttaggagctgctgcatgtcctcagccagagggctgggtcagtctccagcagcgccggtccttgccagctccttcttgcccacaagctgcacgggcccgcctggcctgcctggcctgccctctagtggttcagaggagaatattcacagtggtgcctgggccttggtgggccaggagggtcccagcatggatgggaggggcaatggaatgatgctacggggagtgtggactggagtgcatggaggaggcatggatgagatgtggcgcagaggtgatctgaaggggaaagttcctcatggaatgatacaggtctggactccagagaaagcaggactcttctccagcccggacacctgctcctcaatggctttcaatcacaactggctcgtagaccccagaagagaccctggtggcaagctggatgccgctcagcgtggcagagccatcgcggctcacgaacagccggaggttgctgtcctcggtgttgctgccatctgtgaagtcctggctctgcacgatcttctccacgatggcatccgcatcgatccgcgtgtcgtccacccaggtcgggtggctctccaccgagtccttcttccgcctgaaagagcgatcggacagatgcaggggccggggtggccgcggcggcttctccgggggccggtgctcccgctcactgccctcagggccctccacggtcatgccaaggcccccagaggcgctg

SEQ ID NO: 633 - DNA, 1841 bp, Homo sapiens
cagttttggaaaagtgagctctcggttctgctctgagatgggcagagaagatgcgggccaggagacttactcaggtgggactgggcacagggcaggtatgtgggaggctgggctgcttagtgtcttctagtcacctctgcttgggctgattgacagaggtcagtcattacagccccttatgcctcttccatgggaacaaatactgtgcagatgtttgtaagttaaacataagacacaggggctgttgcttttgaacagaaccctatattactctcctgggatctgagtttctgcaggtcatttgtatgtaggaccaggagtatctcctcaggtgaccagttttggggacccgtatgtggcaaattctaagctgccatattgaacatcatcccactgggagtggttatgttgtatccccatcttggctggcttcagtttttgctgtagccctagagcactttgtttgtgggaggctggcctcttgcctacctccttgcatggacagggggatgaatatttactttcccacctccttgctttttctttcactgataccactgaatggaactggtgctgtgactcctgctgctggggatttatgtcccgagaccttagcctggctgagtggagcctgagacctgcacaacagctcatggtcatgcatgagagagaagtggctggccacagccagagggaacagtaacagcccaggggcctttattttgggaaaggctgtccggggctgttactgtctcttctggttataaagcagacatgtggccatcttttccgcagggttagagtgggctcctttctttttggaatccttttcttctcctttggtagcagctccctgcctccagggcttccgccaccagcgtctctgctgtgttgcgcagtgcagtggggtgcaagggctttgtttctgccctgcctgaaagagagggctctggggatggagatgagaaacaacacgctctccttcagacaatgaggcattctgtcctcctgctgcccattcttcatctccactgagagcccagagtctggtaggagccgaagttgccacaggcattctgcattgctctactcttaggtttgtgtgtgtgatccttcccctccctgttcgcccactcctccctcctctggctattcctaaccctgttctgtggggctcttttaataaccagcctatggttgtggggaattgttcatgggcatttagttccagagtggaggggctttggtcctgaaataaaatgcaagtatttaagattgttgttgcaatttgtgtctaacaagctgtagcagagaaggagggagtgagcgctggcagtatttcctttcataaatcatgaatttatcagtgtggaaataatgcttcagaactgtgctctgtagccctcctgcattgtgtgtgcagctcaagttcaccactggaggaaggattgtcttccaaagagctgggatccaactcttctcacagttctgggcgtgaaccttgttaggtatactttacctgatgctgcttccatcctcgcagtctgtctgaggtgccaggtgctgaaagagaaataaagtttgtcaacaggcagatgcaaagccctggctggtattcatccctctttcctgcccgcctcccctgggtctctcctttatatgatgcagcagagcaaggcgaggatagaaaacctacagaggcaaatccaaaatgtcagaagaagttcatttaaaaggggaaaaaaactccatgtgcaaccctcacaaaaacccgacagatgctaagctaatggcatccgctctgccgattggtggggatggctcatgaatattaatgagct

SEQ ID NO: 634 - DNA, 1324 bp, Homo sapiens
cgattccggagagggagcctgagaaacggctaccacatccaaggaaggcagcaagcgcgcaaattacccactcccgacccggggaggtagtgacgaaaaataacaatacaggactctttcgaggccctgtaattggaatgagtccactttaaatcctttaacgaggatccattggagggcaagtctggtgccagcagccgcggtaattccagctccaatagcgtatattaaagttgctgcagttaaaaagctcgtagttggatcttgggagcgggcgggcggtccgccgcgaggcgagccaccgcccgtccccgccccttgcctctcggcgccccctcgatgctcttagctgagtgtcccgcggggcccgaagcgtttactttgaaaaaattagagtgttcaaagcaggcccgagccgcctggataccgcagctaggaataatggaataggaccgcggttctattttgttggttttcggaactgaggccatgattaagagggacggccgggggcattcgtattgcgccgctagaggtgaaattcttggaccggcgcaagacggaccagagcgaaagcatttgccaagaatgttttcattaatcaagaacgaaagtcggaggttcgaagacgatcagataccgtcgtagttccgaccataaacgatgccgaccggcgatgcggcggcgttattcccatgacccgccgggcagcttccgggaaaccaaagtctttgggttccggggggagtatggttgcaaagctgaaacttaaaggaattgacggaagggcaccaccaggagtggagcctgcggcttaatttgacccaacacgggaaacctcacccggcccggacacggacaggattgacagattgatagctctttctcgattccgtgggtggtggtgcatggccgttcttagttggtggagcgatttgtctggttaattccgataacgaacgagactctggcatgctaactagttacgcgacccccgagcaggagaacagcactgtaggcatgaagatccaggaggagctgcaacgttccgggggcctggaccacctcgtactctcaccaggagaatggcccgtgagtgacaacaccatcatgcacatcgcaaccgccgaggccctcaccacagactactggtgcctggatgatctgtaccgggagatggtgagatgctatgtggaaatcgttgagaagcttccagaacgccggccagacccagctaccattgaaggctgtgctcagctaaagcccaataactaccttctcgcctggcacacaccgttcaatgaaaaaggctcagggtttggag

SEQ ID NO: 635 - DNA, 519 bp, Homo sapiens
cccacgcgtccggagcactttattttttttcaagttattttttgcattgttttggagtagcttcgaataataaacacatatttctgctttaaatttttaatagttaactacattcatgggacaaccaaagcaagaaagcctcatgttttgggggaaagtttgatatcagcaatgtccagacaagagccaaagatgtttgtcttgctctatgttacaagttttgccatttgtgccagtggacaaccccggggtaatcagttgaaaggagagaactactcccccaggtatatctgcagcattcctggcttgcctggacctccagggccccctggagcaaatggttcccctgggccccatggtcgcatcggccttccaggaagagatggtagagacggcaggaaaggagagaaaggtgaaaagggaactgcaggtttgagaggtaagactggaccgctaggtcttgccggtgagaaaggggaccaaggagagactgggaagaaaggacccataggaccagag

SEQ ID NO: 636 - DNA, 1396 bp, Homo sapiens
  misc_feature (1)...(1396): n = a,t,c or g
ttgaaaccagcaccttccctttctctgagtcctgcctccttctgcagaagggagctcaaaagaactttgttgttttgccttttactctggggtgaaagcggcaggaggtatgtgagatggtgaaatgatttgcttctgccatgctggggtcacgggtggatcgccctaaactctcggtggccccctcagtagttttggaagaggaccaagtccttgtctctccagcagtggacctggaagcaggatgccggctcagggacttcactgagaaaataatgaatgtcaaaggaaaagtaattctgtcaatgctggttgtctcaactgtgatcattgtgttttgggaatttatcaacagcacagaaggctctttcttgtggatatatcactcaaaaaacccagaagttgatgacagcagtgctcagaagggctggtggtttctgagctggtttaacaatgggatccacaattatcaacaaggggaagaagacatagacaaagaaaaaggaagagaggagaccaaaggaaggaaaatgacacaacagagcttcggctatgggactggtttaatccaaacttgaaggaatccgaataactaaactggactctggttttctgactcagtccttctagaagacctggactgagagatcatgcggttaaggagtgtgtaacaggcggaccacctgttgggactgcgagattctcaaggggaaggactgggtctcatttctcccatctcagcgcttagcaggatgacctggtatagagcagggaactgggaaatgtgggtcaggggatcagacactccagttgggtcttttatataaattaaatggcaaaaggctccatacccttctccttctttcctaccctccactttatctgcaaaatgggaatgatgataacacccacttcatagaatggtcatgaagatcaaatgagagaataaaagtcaagcacttagcctctggtgcacaataagtattaaataagtatacctattcctccttttcctttttttaaaataatattaccaaatgtccagcttatacacatttacaagacttagctagtgggctatgttagagctactaaaagatctttgacaagctaaaactaagatgcaatgaatgaggtgtaacgaacaagagagttttaagttcagaaatggttacagaagtataagacagctgtgtgggtgttttttggtttttggtttctggtttacaatctcgtcattcaacaaagatgggagttttatagaactaaaagcaccatgtaagctactaaaaacaacaacaaaaaaggctcatcatttctcagtctgaattgacaaaaatgccaatgcaaataaaaatgattactttttattttaaaaaaaaaaaagnaaaaaaaa

SEQ ID NO: 637 - DNA, 1475 bp, Homo sapiens
attcccgggtcgacgatttcgtggccgtccggcctccctgacatgcagatttccacccagaagacagagaaggagccagtggtcatggaatgggctggggtcaaagactgggtgcctgggagctgaggcagccaccgtttcagcctggccagccctctggaccccgaggttggaccctactgtgacacacctaccatgcggacactcttcaacctcctctggcttgccctggcctgcagccctgttcacactaccctgtcaaagtcagatgccaaaaaagccgcctcaaagacgctgctggagaagagtcagttttcagataagccggtgcaagaccggggtttggtggtgacggacctcaaagctgagagtgtggttcttgagcatcgcagctactgctcggcaaaggcccgggacagacactttgctggggatgtactgggctatgtcactccatggaacagccatggctacgatgtcaccaaggtctttgggagcaagttcacacagatctcacccgtctggctgcagctgaagagacgtggccgtgagatgtttgaggtcacgggcctccacgacgtggaccaagggtggatgcgagctgtcaggaagcatgccaagggcctgcacatagtgcctcggctcctgtttgaggactggacttacgatgatttccggaacgtcttagacagtgaggatgagatagaggagctgagcaagaccgtggtccaggtggcaaagaaccagcatttcgatggcttcgtggtggaggtctggaaccagctgctaagccagaagcgcgtgggcctcatccacatgctcacccacttggccgaggctctgcaccaggcccggctgctggccctcctggtcatcccgcctgccatcacccccgggaccgaccagctgggcatgttcacgcacaaggagtttgagcagctggcccccgtgctggatggtttcagcctcatgacctacgactactctacagcgcatcagcctggccctaatgcacccctgtcctgggttcgagcctgcgtccaggtcctggacccgaagtccaagtggcgaagcaaaatcctcctggggctcaacttctatggtatggactacgcgacctccaaggatgcccgtgagcctgttgtcggggccaggtacatccagacactgaaggaccacaggccccggatggtgtgggacagccaggtctcagagcacttcttcgagtacaagaagagccgcagtgggaggcacgtcgtcttctacccaaccctgaagtccctgcaggtgcggctggagctggcccgggagctgggcgttggggtctctatctgggagctgggccagggcctggactacttctacgacctgctctaggtgggcattgcggcctccgcggtggacgtgttcttttctaagccatggagtgagtgagcaggtgtgaaatacaggcctccactccgaaaaaaaaaaaa

SEQ ID NO: 638 - DNA, 1131 bp, Homo sapiens
gagtggtaaaattcacagaagttccaggttcatcatgtcaggatcattccttgtgcaaagtttgatgtagatgaagataaagtggtttcttggtcaataattgcaattgctttcttttaaagtcagtgggtttcttgtatagttctattacaattggcccaagtttaatttcatccatctccatgaaagcaaaacacttggtgctggtaaacctttttttaggcttgtagtgtttgaattcaaagaagatagctgcacctttggttaatttttcaacatgcttctggagctcaatgtccacattaaaatgaacatatgtatcttcttttcttgaagccacaggagtatcttgcacaggagttaagtctatgccattcagatcctttacactaactgtaatatagggattgatgcactgcccagcatctttcaaaccaattttctcaattctgatagtgagtaatgtcattcctggttccgatggcaaccttggtaataaagtaccgggaactctagcaggaaaagaatcaggagaccctgctccagcaccaccctcttcttcatcttcttcaaattccaaattctcttcttcaccaggtgccaaaattcttcttaatgggacaggctgaacatcaaatgggaattctttattatatgtaagaatattctttaggattggttctagcttcttcaggtcctccagtttaaattcttcttgagactgtgtggactgtaaagctgcacttcgcaattccaagcatgttgcaattttgcctatggttttcttttgttcttctgtgaattcagaattattgtgttgagcttgggcctccttttgtagatgtcttgctaatatctgatactcgtctatcgcctccaccagctggccccaagagtcgaagtcggcgcctctcctaaaactggcgccccagcgctgcagcagactccgggtcacctccgacatggccggtccccaccccgtcccctcccgcccctaccccagcaaggccgggttctagggcgccatcctcccccggcctggccccgacattaacagggccaggaggaaccgctacggccaccaccgccacccgccgaggagccgcccaagcccatttgccgcccatgtat

SEQ ID NO: 639 - DNA, 1844 bp, Homo sapiens
  misc_feature (1)...(1844): n = a,t,c or g
cagaactntgggagtccgaggcagacagatcacctgaggtcaggagctcaagaccagcctgaccaacatggcgaaaccctgtcgccactaaaaacacaaaattaggcctggtggcgcatgcctgtaatcccagccactcggtaggccgaggcaggagaatcgcttgaacccaggaggagggaggttgcggtaaactgagatcgcgccattgcattccagcccgggcaccaagagcaaaactcggtctcaaataaataaggctctaacaattgttctcatattttaacatccacaatgtgattcaagatgtaatcaacataaagcttgattgcattattttgcatgctaagttttccaaatccagcttcgtgtcacacctacagcacatctcactcaagctggccacatccctgccatccagacgtaaaacagtcacaagacagggctggcagggccgcggaggaggccggcaggggccatcacggagtgcccatcctgcactgtggtcccagcaagtttcttcctcctggcaagaagcctgtcccaggctggcaggggacagcgtgaggtgcagcctatggactgggaaaggggtgtggaagggccacacctaagtcctaaaatccaggcccaaaagtggcccaactcacttctctgactttaatcacacaggcatacccggtggcaaaggagtatgggaaatggagtcaggctgggtagccacgagcccaggaagaagggagaacagacttggagagggcaggagtctctggccaccaggggctaaagagccttcgatgaggcagtgatgtggggtcctgggctcagacccagggtgggtggctaaggtgcccttgccaggacttagccaccccaacagagatgggtttcgtgcccacgagagtgcctgtgccttgtgacgagaattcaccatgtttttgtctctgcaggcagagaacagcattgacttcatcagcagggagctgtgtgcgcattccatcaggaagctgcaggcccatgtcctgttgatcaagtgagtctggacccatccccttcagtcaccccccaaggagacatgggcgccaggaatctccgggagggggccctggcatgaggctccaagttctctgcgtgtcgaccacatcgctaagactcaagatcttttttgggaagcccccctggcagcagggtcatggaaggaggaaggtcagaggaggggagggctcaggcagcaggggatgggccggggctgtcccatgcctttccacaggtgtcagcggggggcatgcccaggtaaggctccataaccagtgagcccagtctcgactcactgcaacctctgcctcctggattcaaacgattctcctgcctcagcctcccgagtagctgggactacaggcgcccgccaccaggcctggcttatttttgtatttttagtagagacgaggtttcgccatgttggccaggctgctctccatctcctgacctcatgatccgcctgcctcggcctcccagtgttgggattacaggcgtgagccaccgtgcgtggcccaccatagacaatttttaagccataaaaagaaacgaagcactgacacgggctccagcatggatgagcctttaaaacatcgcgctaagtggacgaattcagacacaaccgtctacgtgttgtatggctgcattcacgttcaagtcaagtccaaatagggcacactgcagagacaaagccaggtcatggttgctcaggaccggaagcctgttgggggtgggggggtggggtgtgtgtgtgtgtgtgtaagctcagaggtttgcgatttctttgggggtgatgaaaatgtaattgt

SEQ ID NO: 640 - DNA, 1210 bp, Homo sapiens
ggaagtaggaggagagtcaggactcccaggacagagagtgcacaaactacccagcacagccccctccgccccctctggaggctgaagagggattccagcccctgccacccacagacacgggctgactggggtgtctgccccccttggggggggggcagcacagggcctcaggcctgggtgccacctggcacctagaagatgcctgtgccctggttcttgctgtccttggcactgggccgaagcccagtggtcctttctctggagaggcttgtggggcctcaggacgctacccactgctctccgggcctctcctgccgcctctgggacagtgacatactctgcctgcctggggacatcgtgcctgctccgggccccgtgctggcgcctacgcacctgcagacagagctggtgctgaggtgccagaaggagaccgactgtgacctctgtctgcgtgtggctgtccacttggccgtgcatgggcactgggaagagcctgaagatgaggaaaagtttggaggagcagctgactcaggggtggaggagcctaggaatgcctctctccaggcccaagtcgtgctctccttccaggcctaccctactgcccgctgcgtcctgctggaggtgcaagtgcctgctgcccttgtgcagtttggtcagtctgtgggctctgtggtatatgactgcttcgaggctgccctagggagtgaggtacgaatctggtcctatactcagcccaggtacgagaaggaactcaaccacacacagcagctgcctgactgcagggggctcgaagtctggaacagcatcccgagctgctgggccctgccctggctcaacgtgtcagcagatggtgacaacgtgcatctggttctgaatgtctctgaggagcagcacttcggcctctccctgtactggaatcaggtccagggccccccaaaaccccggtggcacaaaaacctggtgaggcctcccccttcccaagtccattcccactgtaggccgatgcctgtgcaaaggacgcagtgccatatcagagaggatccttgaagaggactcaccccaagcaagggaaaattggtgggggaacttctgccttcctggtttccttgactttggcctcctcctcttcctccttatcttctccaacctccttcctttatttgttccacagactggaccgcagatcattaccttgaaccacacagacctg

SEQ ID NO: 641 - DNA, 1108 bp, Homo sapiens
catatgaacatttcaataaaggtagaaaaagcacttgatattgaatgctttcctcttgattttacaaccaagacaaggaagtccattatcactatttctattcaatagtggacatactagccagcaacaaaactaaaaggtataaagattacaggaaagttaaaccatctctattcacagactgcaagattgtaatcacataaattccaaaagactctacagactctacagtcccacggcagccccttcctccgcgccgcggcggcgcctccggcccacgtcacgctcgcgccattgtttcccagccgctgctcgctgggaccccgccagccctcgagcgcggccattcgccgcgttctgccctctcccccctttcctcacgctggtggtggccctttcctcagtcctgctgatgtcctccagctgattccaggctgttcccggccacccctgaggccgtcctttcgcttcttgtaaaagcctccccgcctcctgagctccctcggtcgcctcccgagaagccaacgggcctctctggtggagcgctaggttgacagcgttttagcaggaccgcgagaaaccggggagatcctcttacgaggaaaaactccaagattacatccctgttatctttcctccaagtagtttctgatcataagttatttgtttaaaaatgatgttttaattagaatttatttgatggcttttaaaaaacttttactgacactcaacatgtttgtttttgtaggaactgactaagactttggaacagaaaccagatgatgcacaatattatcgtcaaagagcttattgtcacattcttcttgggaattactgtggtgcagatgctaatttcagtgactggattaaaaggtgtcgaagctcagaatggctcggaatctgaggtgtttgtggggaagtatgagaccctcgtgttttactggccctcgctgctgtgccttgccttcctgctgggccgcttcctgcatatgtttgtcaaggctctgagggtgcacctcggctgggagctccaggtggaagaaaaatctgtcctggaagtgcaccagggagagcacgtcaagcagctcctgaggataccccgccctca

SEQ ID NO: 642 - DNA, 2418 bp, Homo sapiens
cggagattcgtacgagcggcaccatggccccgcgggggcggcggcggccgcggcctcacaggtctgagggcgcaagacgttcaaagaacactttagaaagaacacattccatgaaagataaagctggtcaaaagtgcaagcctattgacgtgttcgactttcctgataattctgatgtctcaagcattggcaggctgggtgaaaatgagaaagatgaagaaacttatgagacctttgatcctcctttacatagcacagctatatatgctgatgaagaagaattctccaaacattgtggactgtctctctcttcaactcctccaggaaaagaagcaaaaagaagttcagacacttctggaaatgaagcaagtgaaatcgaatctgtaaaaattagtgcaaaaaagccaggaagaaagctcaggcccattagtgatgactctgaaagcattgaagaaagtgatacaaggagaaaagttaaatcagcagagaaaataagtacacaacgtcatgaggttattcgaaccacagcgtcttcagaactttcagagaaaccagctgagtctgtcacttctaaaaagacaggaccccttagtgcccagccctctgttgaaaaagagaacttggcaatagaaagtcaatcgaaaactcagaaaaaaagggaagatatctcatgacaaaaggaagaaatcaagaagtaaagccataggctcagatacttctgacattgtgcacatttggtgtccagaaggaatgaaaaccagtgacatcaaggagttgaatattgttttgcctgaatttgagaaaacccacctagagcatcaacaaagaatagaatctaaagtttgtaaggcagccatcgccacattttatgttaatgttaaagaacaattcatcaaaatgcttaaagaaagccagatgttgacaaatctgaaaaggaagaatgctaagatgatttcagatatcgaaaagaaaaggcagcgtatgattgaagtccaggatgaactgcttcggttagagccacagctgaaacaactacaaacaaaatatgatgaacttaaagagagaaagtcttcccttaggaatgcagcatatttcttatctaatttaaaacagctttatcaagattattcagatgttcaagctcaagaaccaaacgtaaaggaaacgtatgattcatccagccttccagctctgttatttaaagcaagaacacttctgggagccgaaagccatctgcgaaatatcaaccatcagttagagaagctccttgaccagggatgagaagagcagtctactaaaatgtgcctataggaagactagtctcatgctgttaccttctgaaactgtacctttataaatcaattgttttgcaaagaagttatggcctacttagaatctaaaatttgttattcaaattaaatggctgtgaacaatgttaaatagcatcagtttgtccaatagttttaaaggccataatcatcttttctggttaatatcttgagtaattttaaaatgttgacaccttaatcggtcccaggtatgagctataataaacttgtaaaattaagttgatgtgaacataattttgattaattaataaggcgatttctcctgaatttacaccaaagctaatttttaatgaaattgggtttacaggaaggtaaaaaacaaaaattgggaaaggcaaagtaataaaacttagtttatataaacaggttgaatgatatatttatcaaatctcacagacatcaggcaaattatagcctggtgacaaaagtgttcatagtgaattagttactcttgtaatacttctataattagttcatcaggaatttcatccacttcactgttataactgagaagactgttctctgcagcttcagctaattcagcatcttcagtagcttctaaaaaataagcatcatcaatgccattatcccagacagcatcagcagatgcacctgttgacagcctgctaggtgatggtttatgaggattctgggtttcattgctcctagtttcatctgcttcatctgttgtaaactcttcttcctctttgaaaaaaaacaggagacatacttcagcaggtaatgggaaacagtcagatttgaagttttttgctttacatacagggtcatgacattttttataccaaacttcatttttcagatcaaccagaatcctttttgtttaaaaaaaaaaaaaagtattaataccaagactgggtagaaaacaaaatccagctgcatgctgttccaagaaatatgcctaagacttaaagatggagaaaaattaaaaagtaaaaggataaggatagatacataccaatcaaaacggtggttgccaaaaatcacacaaaatgaactgcagggcaaaaagtagatactgatgaaagttcccccaggaagatgtaacaat

SEQ ID NO: 643 - DNA, 1166 bp, Homo sapiens
atgttcccacgaaagcgatattcccgtccacccagtgtaaaacgccggcccgtgcccttgcttattattaagcatccatttaggggaaaggtttcaatgcgccgtcccgtgttaagatagggccccccaaggaacctttaaaaaggcccccccctttttttttttttgaaagtataaaaatcattttactttaatacaaaatcacataaagaaaggcatgttggctaaatcaaatattcactaaatatcagtgaagtcaccactggaatctcaatagcacattttcctgctttcttttctcccttctgctaaccattgaagaccagggtcatccgtgggagcagatgagtaggacacgcgtctgcacgctggaggccctgggggttgacatgggagcaggaagtggacccccccaccctgcacatcccttctgtttttcttgatttcagtctcactggcccaggccaaatcttcaagggtgtctagttctgcagccagggagaaagtgatgccaagagaacctcgtctcctccctcctcagtctgctttgaaggggaaataaatacacaggcctagtgtgtctgtgtggcacagggaggtggttttgccaggcatcttggaaggttgtcttctagaatcagagccatagccttacttgtggccttggatctaggtctgtttccccgatcgaaaaaagaacagcttttttatgattgtcttctcctccttgttcctgccagcatttttggcactagtaaccacagcatctttttctcttcttcctcctgggccttctcttggtggaatcaggccactccccgctggccggagggctctgtctccgcagcccctccacctccttcctgaggtggtccctctccatcttcagctcctccagcgccaggctgccctcattcaccagcgcctccagcatctccaggacgcggacgactttgaactgcagctgcgtcacccgggggtcgctgcccagggccataagctcgcggcccaacaggtaggagatgtcatacacgtcctcggcggtcagctggaaggggctcttgcccagcgccccctcgggcccaacctcgtccctctcctcgtcctcctctccctcctcctattcctcttctcgcacagggggctcctccatggccacccagacc

SEQ ID NO: 644 - DNA, 1024 bp, Homo sapiens
ccccgaaatgaccaccgtctcacccaatcaagacgtgattcatcaagtaagacccgcgcctttctggtccccaggttccttcccgctcacgccggagtcacttccgaagagagaaccgccatgaagagagaagggggtgccgcccacctctgctccgacagcctcccggagtcccagcagcaagacggcaaccacgcacccaacttctccagccacggctcatgccgccgtcgccagcggcgccgacatgacaaggcgctgcatgcccgctaggccaggtttcccctcatccccagccccggggtcgtcgcccccgcgctgccatctgagacccggtagtaccgcccatgctgcagcgggaaagagaacagagagtcctggggacaggtaccgtgcagagggcttgagaaggggccgggtcgcgggggcaagggtatgaggggagggctgcagaccgccgctcttccagttcccgccatcctccgcgagctcaggcgttggcatttcggggcctggcaaatccccgccccgcctccgcgcaggggctactgggagttggagtttgcttctctgtagttgggcagctgctcttggtctagtgaccaccagcctggacagctacggagaacccgccttaggtagaaagaaagtgatttttttcctttgcaagagtttgacccgggaccctaactgcttaatgcatatttagatcgttttctgtacgttgtcagttctactgatcctagtggtttagtaatataaaccttttctatgttgtgggtgaaattatgtaacctgtgatgagggaatcccttccacgaattactttgtagtccagcgtgcacgctagttcatacttaaaagaacttgcagatttggaatgtgacgtgttttctctttcagtaacttcgacgcctctccaagaggctaatttttttttaaagattttgtgggagctatgtaatgagatggggagtttcatctaatgacatcctctgacaataaaacatgtttaaattcccta

SEQ ID NO: 645 - DNA, 499 bp, Homo sapiens
acccacgcgtccgaaaagagcagagctaccatgtcctcttggagcagacagcgaccaaaaagcccagggggcattcaaccccatgtttctagaactctgttcctgctgctgctgttggcagcctcagcctggggggtcaccctgagccccaaagactgccaggtgttccgctcagaccatggcagctccatctcctgtcaaccacctgccgaaatccccggctacctgccagccgacaccgtgcacctggccgtggaattcttcaacctgacccacctgccagccaacctcctccagggcgcctctaagctccaagaattgcacctctccagcaatgggctggaaagcctctcgcccgaattcctgcggccagtgccgcagctgagggtgctggatctaacccgaaacgccctgaccgggctgcccccgggcctcttccaggcctcagccaccctggacaccctggtattgaaagaaaaccagctggaggtcctggagg

SEQ ID NO: 646 - DNA, 709 bp, Homo sapiens
ctgacttacagctcttataaactagtggcaatttctgaacccagccggctccatctcagcttctggtttctaagtccatgtgccaaaggctgccaggaaggagacgccttcctgagtcctggatctttcttccttctggaaatctttgactgtgggtagttatttatttctgaataagagcgtccacgcatcatggacctcgcgggactgctgaagtctcagttcctgtgccacctggtcttctgctacgtctttattgcctcagggctaatcatcaacaccattcagctcttcactctcctcctctggcccattaacaagcagctcttccggaagatcaactgcagactgtcctattgcatctcaagccagctggtgatgctgctggagtggtggtcgggcacggaatgcaccatcttcacggacccgcgcgcctacctcaagtatgggaaggaaaatgccatcgtggttctcaaccacaagtttggaaatttgactttctgtgtggctggagcctgtccgaacgctttgggctgttaggggtaagtcaaaagtgcattcccccctgcctcacacatttttttggttcagcccccccacttgtctttttgctcctggtcattcagaacttgcagaagaatcaacagagtttttacttgatgaaatggtcctaataaactgcttttttattcttgctaggaaaaaaaaa

SEQ ID NO: 647 - DNA, 1498 bp, Homo sapiens
tttcgtgcgggggtgggctctgcgcgtaatggcagcgccgtggcctcgcgtccatctttgccgttctctcggacctgtcacaaaggagtcgcgccgccgccgccgccccctccctccggtgggcccgggaggtagagaaagtcagtgccacagcccgaccgcgctgctctgagccctgggcacgcggaacgggagggagtctgagggttggggacgtctgtgagggaggggaacagccgctcgagcctggggcgggcggaccggactggggccggggtaggctctggaaagggcccgggagagaggtggcgttggtcagaacctgagaaacagccgagaggttttccaccgaggcccgcgcttgagggatctgaagaggttcctagaagagggtgttccctctttcgggggtcctcaccagaagaggttcttgggggtcgcccttctgaggaggctgcggctaacagggcccagaactgccattggatgtccagaatcccctgtagttgataatgttgggaataagctctgcaactttctttggcattcagttgttaaaaacaaataggatgcaaattcctcaactccaggttatgaaaacagtacttggaaaactgaaaactacctaaatgatcgtctttggttgggccgtgttcttagcgagcagaagccttggccagggtctgttgttgactctcgaagagcacatagcccacttcctagggactggaggtgccgctactaccatgggtaattcctgtatctgccgagatgacagtggaacagatgacagtgttgacacccaacagcaacaggccgagaacagtgcagtacccactgctgacacaaggagccaaccacgggaccctgttcggccaccaaggaggggccgaggacctcatgagccaaggagaaagaaacaaaatgtggatgggctagtgttggacacactggcagtaatacggactcttgtagataatgatcaggaacctccctattcaatgataacattacacgaaatggcagaaacagatgaaggatggttggatgttgtccagtctttaattagagttattccactggaagatccactgggaccagctgttataacattgttactagatgaatgtccattgcccactaaagatgcactccagaaattgactgaaattctcaatttaaatggagaagtagcttgccaggactcaagccatcctgccaaacacaggaacacatctgcagtcctaggctgcttggccgagaaactagcaggtcctgcaagtataggtttacttagcccaggaatactggaatacttgctacagtgtctgttacagtcccaccccacagtcatgctttttgcacttatcgcactggaaaagtttgcacagacaagtgaaaataaattgactatttctgaatccagtattagtgaccggcttggtcacattggagtcctggggctaatgatcctgattatctgaaacgtcaagttggt

SEQ ID NO: 648 - DNA, 1013 bp, Homo sapiens
agattcggcactaggggcttggctaaaagtaagggtgtcgtgctgatggccctgtgcgcactgacccgcgctctgcgctctctgaacctggcgcccccgaccgtcgccgcccctgccccgagtctgttccccgccgcccagatgatgaacaatggcctcctccaacagccctctgccttgatgttgctcccctgccgcccagttcttacttctgtggcccttaatgccaactttgtgtcctggaagagtcgtaccaagtacaccattacaccagtgaagatgaggaagtctgggggccgagaccacacaggccgaatccgggtgcatggtattggcgggggccacaagcaacgttatcgaatgattgactttctgcgtttccggcctgaggagaccaagtcaggaccctttgaggagaaggttatccaagtccgctatgatccctgtaggtcagcagacatagctctggttgctgggggcagccggaaacgctggatcatcgccacagaaaacatgcaggctggagatacaatcttgaactctaaccacataggccgaatggcagttgctgctcgggaaggggatgcgcatcctcttggggctctgcctgtggggaccctcatcaacaacgtggaaagtgagccaggccggggtgcccaatatatccgagctgcagggacgtgtggtgtgctactgcggaaggtgaatggcacagccattatccagctgccctctaagaggcagatgcaggtgctggaaacgtgcgtagcaacagtaggccgagtatccaacgttgatcataacaaacgggtcattggcaaggcaggtcgcaaccgctggctgggcaagaggcctaacagtgggcggtggcaccgcaaggggggctgggctggccgaaagattcggccactaccccccatgaagagttacgtgaagctgccttctgcttctgcccaaagctgatatccctgtactctaataaaatgccccccccccccgttttaaaaaaaaaa

SEQ ID NO: 649 - DNA, 1504 bp, Homo sapiens
ttcggcacgaagcgtgtctcggggtggacgatgttatttgaaaagttacaggacagattttctgtgttaatggacatgagccatacattgagagggctgctggctactgaaagaaatataaaattttaaaatttctgaaatcatgcagttaacatctgcacacttcactatattttaagtttttgttaatataaaagaataagaaaacagaaaagtattactgttaaacaataatagagaaatgtatactttatttataaatttctccctctagctgatcatacagttgaccagttcagggtgcccgctgctggttggatgccaggcggaatgtcagggtgttctctggtgtctgttgtggctgtgggatccacggttactgggcggagccctgtggtggctgtggtgccatggaggggctgcgatcttctgtggagctggaccctgagctgactccagggaagctggatgaggagatggtggggctgccaccccatgacgcgagtcctcaagtcactttccacagcctcgatgggaagacagtggtgtgtccacacttcatgggcttactgctgggtctcttacttttattgactttgtctgttaggaaccaactctgtgtaagaggtgaaaggcagcttgcagaaacactgcattcacaggtgaaggagaaatcccagctcattggcaagaaaacagattgtagagactgaggcatctttaaaagatgtcagggtacagaaaaagtctttcaacacccccggctttgtagatgcctacaagaaggtgaatagcaccaacgagatgctgatggagaaatttaccaccctcgttcaagaactgaaagaagagacatcctccagactctccaggcaacaagaggagctggtagagatgctaacaacgctggaggccctgggagaggccatgagagccaccccgtcacaaggagcttttccacacctgccatgcagctgagagccaagccctgctgctctctcccccacgagggggctgggtcttagagcagcactgttcttttcccctccacccaggcctcccgagctgccaggctctgtgctcccacactgactccatctgaggggtccttgaggccagtggatctggagtaccccgcccctggcctggagttcctcctccttctcacgctgacactgcagccagctcctcaatgggcggtgcctccaaatctaaagaatatggaggtcctggagcacaccaagaaatgagggactttttctttgcagaaagtttgaattctgtcttaatgagacagaatgccatacttgagcacctcatcttttgctcaaattgaaatgtcatcgaactgtatttctcaagtcaaaggtctgtaaatatgatttatgtattaatctcctaagtgaacaatttatattttatcctctacataattatcgtattatgctttaaatatatatttagtttatcaataaagacattcagtactcaatagcaaaaaaaa

SEQ ID NO: 650 - DNA, 2231 bp, Homo sapiens
  misc_feature (1)...(2231): n = a,t,c or g
gcggccgcagacaaagggcggctcgcgcccgggccgccacgctctcgggctctgcctcgggaaggagacttggtctgaaagatgccacattcctgcagcctctcttggtgcagtggaatacagtcttgggcgaggtggcgtggatgagctggtgaaagaggatgctgcccacatccaaaggctccagaggatcctgggcctgggcagctgagctcccctgcatttgggaacctcaggcgtaacttgggtgtagagctcatgaaaggtgcttgtgtttctccagctttttttcaccagtgccttaccagactgggctcaggttttgggaattctaagggtgagctgggtaggaaacagggagagggtaggaaagaagcccctggggatgccttcccagaattcatttgatggggatccctggcataactgcttgggaacacagaaagaggctgtgacacagctgagcttttggagcattttaaggagctccagctccagcaaaacaaactcttgcatttcagcccagaaagagcctcttgtaacaaagtattccaaaggggagagtttctgcatcttttactttgcagtccactatggtagaaaacttgacattccatagataatgatactgggttttctttccaagatgccagctttaaaagaaatatgagccattctaagctttaagaagggttcaggaaacacaggaattagtagacagccctcccaatgcaggttaagacgacagcctgcgcccccaactagcacagctcagcgagcatgaccatatgccattctcgtctccagagagctggtggcagtgacctcactaggagaaaacacatccctcagccgtgggacttgacagaatgaggtgcgcgagggaggccgctagccgagacttggcctttcctgactgcccctgtgttacctgggcagctccagatcactgagcccacaatggctgagaagggtgactgcatcgccagtgtctatgggtatgacctcggtgggcgctttgttgacttccaacccctgggcttcggtgtcaatggtttggtgctgtcggccgtggacagccgggcctgccggaaggtcgctgtgaagaagattgccctgagcgatgcccgcagcatgaagcacgcgctccgagagatcaagatcattcggcgcctggaccacgacaacatcgtcaaagtgtacgaggtgctcggtcccaagggcactgacctgcagggtgagctgttcaagttcagcgtggcgtacatcgtccaggagtacatggagaccgacctggcacgcctgctggagcagggcacgctggcagaagagcatgccaagctgttcatgtaccagctgctccgcgggctcaagtacatccactccgccaacgtgctgcacagggacctgaagcccgccaacatcttcatcagcacagaggacctcgtgctcaagattggggatttcgggttggcaaggatcgttgatcagcattactcccaacaagggttatctgtcagaagggttggtaacaaagtggtaccgttccccacgactgctcctttcccccaataactacaccaaagccatcgacatgtgggccgccggctgcatcctggctgagatgcttacggggagaatgctctttgctggggcccatgagctggagcagatgcaactcatcctggagaccatccctgtaatccgggaggaagacaaggacgagctgctcagggtgatgccttcctttgtcagcagcacctgggaggtgaagaggcctctgcgcaagctgctccctgaagtgaacagtgaagccatcgactttctggagaagatcctgacctttaaccccatggatcgcctaacagctgagatggggctgcaacacccctacatgagcccatactcgtgccctgaggacgagcccacctcacaacaccccttccgcattgaggatgagatcgacgacatcgtgctgatggccgctaaccagagccagctgtccaactgggacacgtgcagttccaggtaccctgtgagcctgtcgtcggacctggagtggcggcctgaccggtgccaggacgccagcgaggtacagcgcgacccgcgcgcgggttcggcgccactggctgagaacgtgcaggtggacccgcgcaaggactcgcacagcagctccgcctcgtgccaagctggtcgtaatggtgtcagtcggtatcagtntnntctcccct

SEQ ID NO: 651 - DNA, 2458 bp, Homo sapiens
atgaggacacttgggacttgcctggcgactttggccggacttttgctaactgcggcgggcgagacgttctcaggtggctgcctctttgatgagccgtatagcacatgtggatatagtcaatctgaaggtgatgacttcaattgggagcaagtgaacaccttgactaaaccgacttctgatccatggatgccatcaggttctttcatgctggtgaatgcctctgggagacctgaggggcagagagcccacctgctcttaccccaacttaaagaaaatgacacccactgcatcgattttcactattttgtgtccagcaagagtaattctcctccggggttactcaatgtctacgtgaaggtcaataacgggccactggggaatcctatctggaatatatctggagacccaacacgtacatggaacagggcagaactggccattagtactttctggcctaacttttatcaggtgatttttgaagtgataacttctggacatcaaggctatctcgctatcgatgaggtgaaggtgttaggacatccatgtaccaggactcctcacttcctgcggattcagaatgtggaagttaatgctggccagtttgctaccttccagtgcagtgccatcggcaggaccgtggcaggagacaggctctggttacagggcattgatgtgcgagatgctcctctgaaggaaatcaaggtgaccagctcccgacgcttcattgcttcatttaatgttgtgaataccaccaaacgagatgctggaaagtaccgctgcatgattccgcactgaaggaggtgttggaatatcaaactatgcagagttgggtagttaaagaaccacccgttcctattgccccacctcagctcgcctctgtaggagccacctacctgtggatacagctcaacgccaactccatcaatggggatgggcccattgtggcccgagaggtggagtactgcacggccagtgggagctggaatgaccggcagccagtcgattccacgagctataaaattggacaccttgacccagatacagaatatgagattagtgtgctcctgaccaggccaggggagggtggcactggctctcctggtccagctctcaggacaagaacaaagtgtgctgatcccatgcgaggcccaagaaaactagaagtagtggaggtcaaatctcggcaaatcactatccgctgggagccatttggatataatgtaactcgttgccacagttataatctcactgtccactactgttaccaagttggaggacaagaacaagtgcgagaagaagtaagctgggatacagaaaattcacaccctcaacacacgatcactaacctgtcaccatacaccaatgtcagtgtgaaactgatcctcatgaacccagagggccggaaggaaagccaagaactcatagtgcagacagatgaagacctcccaggtgctgttcccactgaatccatacaaggaagtacctttgaagagaagatatttcttcagtggagagaaccaactcaaacatatggtgtaatcactttatatgagatcacctacaaagcagtcagttcctttgacccagaaatagatttatccaatcagagtggaagagtttcaaagctgggaaatgaaacccattttctgttttttggactgtatccggggaccacatactcctttaccatccgagctagcacagctaagggttttgggcctccagcaacaaaccagttcaccaccaaaatatcagcaccctctatgccagcttatgaacttgagacacctttgaatcaaactgacaataccgtgacagtcatgctgaaacctgcccacagcagaggagcacctgtcagtgtctatcaaatagttgttgaggaagaacgtcctcgaagaactaaaaagacgacagaaatcttaaagtgctacccagtgccaattcacttccagaatgcttctctgctgaactcacagtactactttgctgcagaatttcctgcagacagcctccaagctgcgcagccttttacaattggtgataataagacatataatggatactggaacactccccttctcccctataaaagctacagaatttatttccaagctgctagtagagccaatggggaaaccaaaatagactgtgtccaagtggccacaaaaggagctgccactccgaaaccagtcccagaacccgagaaacagacagaccatacagttaaaattgctggagtcatcgcgggcatcttgctgttcgtgattatatttcttggagttgtgttggtaatgaagaaaaggctttacaagcatggtgccagcatctgttcagcttctggtgaggcctcaggaagcttccaatcatggaggaaggcaaagcacaagcaggcgtgtcccatggcaagagcaggagcacgagagcgagcgggagggtgtctcaaactttgaaacaacca

SEQ ID NO: 652 - DNA, 457 bp, Homo sapiens
  misc_feature (1)...(457): n = a,t,c or g
aatagactgcgtaacctacgccanngcgnggaattcgtcagcttctgcagctctcccgggctagcatggcagcgcggaagagttggacggccctgcggctctgcgccacagttgttgtacttgatatggtcgtctgtaaaggatttgtacaagatttagatgaatcgtttaaagaaaatcgaaatgatgacatttggcttgtacatttttatgcgccatggtgtggccattgtaaaaagctggaaccaatttggaatgaagctggtcttgagatgaaaagcattggttctccagttaaggctggaaagatggatgctacttcctattctagcattgcttcagagtttggagttcgaggttatccaacaattaagctggctctaattcggccacttccaagtcaacaaatgtttgaacatatgcacaagagacaccgcgtatttttcgtttatgtaag

SEQ ID NO: 653 - DNA, 1014 bp, Homo sapiens
tttttcctttccttttccctttctcctttccctctccatagtgaagctaatgtactttgcacagtgttagcaattatcacccattcatcaggtattaattcatttcgatcccaagggcataggcttgatgtacaataaggagttaaggactgtgagttctctgataaggtttggttatagtcatttctcacttctcaccctctccaggactacttccagcaacccagtctcctgccatgtccgaccccatcacgctgaacgtcggggggaagctctatacaacctcactggcgaccctgaccagcttccctgactccatgctaggcgccatgttcagcgggaagatgcccaccaagagggacagccagggcaactgcttcattgaccgtgacggcaaagtgttccgctatatcctcaacttcctgcggacctcccaccttgacctgcctgaggacttccaggagatggggctgctccgcagggaggccgacttctaccaggtgcagcccctgattgaggccctgcaggagaaggaagtggagctctccaaggccgagaagaatgccatgctcaacatcacactgaaccagcgtgtgcagacggtccacttcactgtgcgcgaggcaccccagatctacagcctctcctcttccagcatggaggtcttcaacgccaacatcttcagcacctcctgcctcttcctcaagctccttggctctaagctcttctactgctccaatggcaatctctcctccatcaccagccacttgcaggaccccaaccacctgactctggactgggtggccaatgtggagggcctgccagaggaggagtacaccaagcagaacctcaagaggctctgggtggtgcccgccaacaagcagatcaacagcttccaggtcttcgtggaagaggtactgaaaatcgctctgagcgatggcttctgcatcgattcttctcacccacatgctctggattttatgaacaataagattattcgattaatacggtaca

SEQ ID NO: 654 - DNA, 1725 bp, Homo sapiens
attcgtgcgccgataatttggtggcggcgtccggagggtgctggtttgttctcggtgaacggcgcgcggggtctctcctgagtgcgagctacgggaccttcgccatgccggggatggtactcttcggccggcgctgggccatcgccagcgacgacttggtcttcccagggttcttcgagctggtcgtgcgagtgctgtggtggattggcattctgacgttgtatctcatgcacagaggaaagctggactgtgctggtggagccttgctcagcagttacttgatcgtcctcatgattctcctggcagttgtcatatgtactgtgtcagccatcatgtgtgtcagcatgagaggaacgatttgtaaccctggaccgcggaagtctatgtctaagctgctttacatccgcctggcgctgttttttccagagatggtctgggcctctctgggggctgcctgggtggcagatggtgttcagtgcgacaggacagttgtaaacggcatcatcgcaaccgtcgtggtcagttggatcatcatcgctgccacagtggtttccattatcattgtctttgaccctcttggggggaaaatggctccatattcctctgccggccccagccacctggatagtcatgattcaagccagttacttaatggcctcaagacagcagctacaagcgtgtgggaaaccagaatcaagctcttgtgctgttgcattgggaaagacgaccatactcgggttgctttttcgagtacggcagagcttttctcaacctacttttcagacacagatctggtgcccagcgacattgcggcgggcctcgccctgcttcatcagcaacaggacaatatcaggaacaaccaagagcctgcccaggtggtctgccatgccccagggagctcccaggaagctgatctggatgcagaattaaaaaactgccatcattacatgcagtttgcagcagcggcctatgggtggcccctctacatctacagaaaccccctcacggggctgtgcaggattggtggtgactgctgcagaagcaagaacccacagactatgacttggtcggaggcgatcagcttcaactgtcacttcggctcccatcctgcacacccacagggctgcagtacagggacttcatccacgtcagcttccatggacaaggtttacggagctgccgtttttagtggctctggatcacaggaaagagtctgttgtggtcgctgtgagggggaccatgtctctgcaggatgtccttacggacctgtcagcggagagtgaggtgctagacgtggagtgtgaggtgcaggaccgcctggcacacaagggtatttctcaagctgccagatacgtttaccaacgactcatcaacgacgggattttgagccaagccttcagcattgctcctgagtaccggctggtcatagtgggccacagcctcgggggaggggcggccgccctgctggccaccatggtcagagccgcctacccgcaggtcaggtgctacgccttctccccaccccgggggctgtggagcaaagctctgcaggaatattctcagagcttcatcgtgtcactcgtcctggggaaggatgtgattcccaggctcagtgtgaccaacttggaagatcttgaagagaagaatcttgcgagtggtcgcgcactgcaataaacccaagtacaagatcttgctgcacggtttgtggtacgaactgtttggagg

SEQ ID NO: 655 - DNA, 748 bp, Homo sapiens
tttcgtgcggcgactgcagcagcgaaggggaatgggggcggcggtggcagggccggggccggggacgccagcggcacgcggaagaagaagggcccggggcccctggccacggcgtacctggtcatctacaatgtggtgatgacagccgggtggctggttatagcggttggtctggtccgagcatacctggctaagggtagctaccatagcctttattattcaattgaaaagcctttgaaattctttcaaactggagccttattggagattttacattgtgctataggaattgttccatcttctgttgtcctgacttctttccaggtgatgtcaagagtttttctaatatgggcagtaacacatagcgtcaaagaggtacagagtgaagacagtgtccttgtttgttattgcatggacgatcacggaaatcatccgttactccttttatacattcagtctattaaaccatctgccttacctcatcaaaagggccaggtacacacttttcattgtgctgtacccaatgggagtgtcaggagaactgctcacaatatatgcagctctgccctttgtcagacaagctggcctatattccatcagtttacccaactctacaaaaaaaatttttttaattagccaggtatggtggcatatgcttgcagtctcagctgacgctaaggcggcagaaatgcctgctgtacttaagcctgggccatagagaaggaccttgtctctaaataaataaata

SEQ ID NO: 656 - DNA, 977 bp, Homo sapiens
cggccgcgtcgacagacagacgggagcagtgcttttcctagagtagagtatgctctataaatgtctactgaatgttgactggtgttggatgtcttgtctcctcagaatctctgagctgcgtgcagtgtaattcatgggaaaaatcctgtgtcaacagcattgcctctgaatgtccctcacatgccaacaccagctgtatcagctcctcagccagctcctctctagagacaccagtcagattataccagaatatgttctgctcagcggagaactgcagtgaggagacacacattacagccttcactgtccacgtgtctgctgaagaacactttcattttgtaagccagtgctgcgaaggaaaggaatgcagcaacaccagcgatgccctggaccctcccctgaagaacgtgtccagcaacgcagagtgccctgcttgttatgaatctaatggaacttcctgtcgtgggaagccctggaaatgctatgaagaagaacagtgtgtctttctagttgcagaacttaagaatgacattgagtctaagagtctcgtgctgaaaggctgttccaacgtcagtaacgccacctgtcagttcctgtctggtgaaaacaagactcttggaggagtcatctttcgaaagtttgagtgtgcaaatgtaaacagcttaacccccacgtctgcaccaaccacttcccacaacgtgggctccaaagcttccctctacctcttggcccttgccagcctccttcttcggggactgctgccctgaggtcctggggctgcactttgcccagcaccccatttctgcttctctgaggtccagtagcactccctgcggtgctgacaccctctttccctgctctgccccgtttaactgcccagtaagtgggagtcacaggtctccaggcaatgccgacagctgccttgttcttcattattaaagcactggttcattcactgcccaaaaaaaaaaaacatt

SEQ ID NO: 657 - DNA, 746 bp, Homo sapiens
tttcgtggcggaacggaggaggaggcggtggtgtcccggctgcggggtaggagtccgcggcagcctccgggtaagccaagcgccgcgcagtgctgagttcccgcacgccgcagagccatggagatcggcaccgagatcagccgcaagatccggagtgccattaaggggaaattacaagaattaggagcttatgttgatgaagaacttcctgattacattatggtgatggtggccaacaagaaaagtcaggaccaaatgacagaggatctgtccctgtttctagggaacaacacaattcgattcaccgtatggcttcatggtgtattagataaacttcgctctgttacaactgaaccctctagtctgaagtcttctgataccaacatctttgatagtaacgtgccttcaaacaagagcaatttcagtcggggagatgagaggaggcatgaagctgcagtgccaccacttggccattcctagcgcgagacctgaaaaaagagattccagagtttctacaagttcgcaggagtcaaaaaccacaaatgtcagacagacttacgatgatggagctgcaacccgactaatgtcaacagtgaacctttgagggagccagcaccctctgaagatgtgattgatattaagccagaaccagatgatctcattgacgaagacctcaactttgtgcaggagaaacccttatctcagaaaaaacctacagtgacacttacatatggttcttctcgccc

SEQ ID NO: 658 - DNA, 559 bp, Homo sapiens
cctccctgctgtgggctggcctgggaggaagggggtggggtgcacttacatttgcaggtctttccagcccctggggcagcctgattaaccagcttctccagggccaagctgttgggggtgaggtgcagcccgaagcagccagaccagcccctgagcctcccgggtgctggcagctgtcatggggctaccctgggggcagcctcacctagggctgcagatgctcctcctggcgttgaactgtctccggcccagcctgagcctggagctggtgccctacacaccacagataacagcttgggacctggaagggaaggtcacagccaccaccttctccctggagcagccgcgctgtgtcttcgatgggcttgccagcgccagcgataccgtctggctcgtggtggccttcagcaatgcctccaggggcttccagaacccggagacactggctgacattccggcctccccacagctgctgaccgatggccactacatgacgctgcccctgtctccggaccagctgccctgtggcgaccccatggcgggcagcggaagcgcccca

SEQ ID NO: 659 - DNA, 538 bp, Homo sapiens
ctgggaaggacttgggggactagaggcgaggggagagagcttgtggaaggtgcggcagagaagggcccaggagaaaggaggaagggaaggagctggaggggcgggagaacaggagacagaacaggacagagacagctgcccgggaggatgggagaacagaaagagggaggaaacgccgagcactgacctgggggaggggagtaaagagaagtgaagggggattggaagggaactggagaatgagagaagcaacaggcggggtgcgtgtaggagggcgggagagccaatgacaagacagaaaaggcagagaaagcaaagcaagaccagactcctcatccggtaacactgtgtcaggtcattgccctcccaccccgcccccaaccccataactgaaaacaagtaggaacctggataaaatagtcttaacaattttttttttgagacggagtcttgctgtgttgcccaggctggagtgcagtggcgcgatctcggctcactgcaggctccgcctcccgggtttaagcggttctcctgccta

SEQ ID NO: 660 - DNA, 735 bp, Homo sapiens
acgatttcgtccggccccggcgccccagcccctggccaagcctctgctgtcattttttctccctcctctcagtctgcagctgcgggacgggccgggctcctcagtttctgctgtgttgtgaccccacgaggcgctcagcacccagggaaggcgcgtgtgtccccgatgctggctcctccctgagccccgacggctctcgaggttctgagcctgtggcctgcacagggaacttcctctccgactgcatttatgcctctgtggatgtgaaggctatttctagaaatctcttcctttgcagaaacacccgaaaccctcctgccaggaagaccagggcctgggaagagggtcgctctccggccattctcccctcaccctcctcaccttcctcacatcctgtgccctgggggaccagcagctgcttccacccagaacaagcgggagcctgtgtcaggaaagcatgtcagagcagagctgccagatgtccgaactgcggctcctcctcctgggaaaatgccgctcgggaaaaagtgccacaggaaatgccattctgggcaaacatgtgttcaagtccaagttcagtgatcagacagtgatcaaaatgtgccagagagagagttgggtcctgagagaaaggaaggttgtggtaattgacacccctgaccttttctcctcaatagcttgtgctgaagacaagcaacgcaacatccaacacttgttggagctctctgctcccag

SEQ ID NO: 661 - DNA, 978 bp, Homo sapiens
tttcgtggagacgactgtgagcgtgcaaagcgcagagtcctctgatgccctgagctggtccaggctgcccagggccctggcctccgtaggccctgaggaggcccgaagtggggcccccgtgggcggggggcgttggcagctctccgacagagtggagggagggtccccaacgctgggcttgcttgggggcagcccctcagcacagccggggaccgggaatgtggaggcgggaattccttctggcagaatgctggagcctttgccctgttgggacgctgcgaaagatctgaaagaacctcagtgccctcctggggacagggtgggtgtgcagcctgggaactccagggtttggcagggcaccatggagaaagccggtttggcttggacgcgtggcacaggggtgcaatcagaggggacttgggaaagccagcggcaggacagtgatgccctcccaagtccggagctgctaccccaagatcaggacaagcctttcctgaggaaggcctgcagccccagcaacatacctgctgtcatcattacagacatgggcacccaggaggatggggccttggaggagacgcagggaagccctcggggcaacctgcccctgaggaaactgtcctcttcctcggcctcctccacgggcttctcctcatcctacgaagactcagaggaggacatctccagtgaccctgagcgcaccctggaccccaactcagccttcctgcataccctggaccagcagaaacctagagtggtggagtctcgctctgtcacccaggctggagtgcagtggcatgatatcggctcactgcaacctctgcctcccggattcaagcaattctcccgcctcagccttccgaatagctgggactacaggcgcatgccaccatgcccggataatttttggatttttagtagagaggggatttcaccatgttggccaggatggcctctatctcttgatcttgtgatacg

SEQ ID NO: 662 - DNA, 1118 bp, Homo sapiens
catgaactcccggccttaagtgacccacctgcctcggcctcccaaagtgctgggactataggtgtgggccactgcgcccggccagtgtattttaaaattataaagccgatatattacaaagtaaaatgcaggggaaaaaaagtcacaagaagtataaagattggatgcttcttgtgcttctttttgtaaaatacagatgatcctcaagaagtaacttgagcagattttctactggctttcaaattgataaccctacaccccctataaatttttacattccttaacagagctaaccataggaacttccaaataatttctcagtggaaatgagtcttcaaaatcacacatggctcataagagttttgcttttttaatgccttctcaaaggacccagactgctagattttcataataactactttaaccagatagacttactatagggtggtagttccccactaaaagatacttttctcttgcttagtagtcaccttcctgtgttctagagcttccctatgcttttaaaatatgcattattacaacagttctcctaaaaacaaaacccccataagagctgctgcactcggggagccctgaatgaattttaaagcagcgcctgagtcctgcattctttcttcattgtcctttttgcttaatttgcctgtggtgtaccatcaaccttacaatggagacagagagaaagtactccccctaacctatttaagaaacatttgcaatatactgttttttttttttacaagtctttaattaaaaaactcaacaaaaatatataattgagcattttacataatgcatacattcttaatatctgcaggtaagataaacaacagaaggcaaaagcagatatgctgtattgcttctttggcaactcaccaatatcatcccctgcagaaacagagtttttttttttttttttttaaatccatggtcttaaaataattgtcccttagtataaacaaaatatttagcaataatacagtagacggattcttcaaattcacaacaatttataatactttataccacaagggtaaactagtaagctgctttctaaaattaaggcagcagcagtgtttagagggggagtaaaaaaaaaa

SEQ ID NO: 663 - DNA, 556 bp, Homo sapiens
gaaatgcctattttcatttctgatcttacttacttgtgttttttctctttttaattattcttactagaagtttatcaattttattactctttccaaagaacaagcttttggctttgctaattttctctattatttacttgttttaaaaaatgtattggtttctgctcttatctttattatgtttttcttctacttagtattaatttagtttgttcttttcctagcctcttaaggtagaaacttagataattgattttaagccttcctttactatatgggcacttgaaaagctatacatttccctctgaacactaccttcatttgctacaaacatttgctacattcaacaaatatttgaatgtgtgtgttttaattttcattcatcacaaacccgtggtcccagctattcaggggactaatgtgggaggatcacttgagcccaggaggttgaggctgcagcaagccatgattgtgccactacattttggcctgggcaacagagtgagaccctgtctcaaaaaacaacaacaacaacaacaacaacaacaaaaaaaaa

SEQ ID NO: 664 - DNA, 373 bp, Homo sapiens
agaatggagaccaaacctgtgataacctgtctcaaaaccctcctcatcatctactccttcgtcttctggatcactggggtgatcctgctggctgccggagtctggggcaaacttactctgggctcctatatctcccttattgccgagaactccacatatgctccctatgtgctcatcgtaactggcaccactatcgttgcctatcctctagtttgattcttcttctcctattcttctgggttctcttacattctagccgtccgcctcattgctggaattgctctcgtctacaactacatccctcgatcttcatcgcgtgcgttagtccgtctcgtcgtcttgcttcgtttcctcctctctcgtcatccttccc

SEQ ID NO: 665 - DNA, 411 bp, Homo sapiens
  misc_feature (1)...(411): n = a,t,c or g
agaacgcagaacatccaggcatggatagacatgatctgtgtcagaaggccaaactggccgagcacgctgagcgagatgatgacatggcagcctgcatgaagactgtaactgatcaaggagctgaattatccaatgaggagaggaatcttctctcagatgctcataccaatgctgtatgagcccgtaggtcatcttggatgggcgcatgacgtatcgaacaaaagaccgaaggtgctgacacacagcagcagatggctccagactgcagagagatttttgcgacggagctaagagatatctgcgatgatgtactgtctcttttggaaaagctcttgatccccaatgcttcacatgcatagagcttagtctactatttgcacatgatcggagattactaccgttactggcttn

SEQ ID NO: 666 - DNA, 333 bp, Homo sapiens
tggcggcggtccgctggggaagatgccgcgggcgcagttggcggacccgtggcagatgatggctgtggagagcccgtccgactgcgctgacaatggacagcaaattatggatgaacctatgggagaggacgagattagcccacaaactgaataagtcagtatcaaagaagttgctgtcacacattgtgtaaaggaaggacatgataaggcagatccttcccagattgaacttttaagagtcttacggcagggatcattgggaaaggtgtacttaggtaagaaagtctcaggctctgatgctaagcagctgtatgccatgaaggtattgacgag

SEQ ID NO: 667 - DNA, 1991 bp, Homo sapiens
agacgctgcaggaattcggcacgaggcgcatttcggcaagttggagtgcttagtgcagttggtgagagcgggagctctcactcttcgtctccaccacacggtacgcgcagacgccagcgccacattgcagcctttgggggacatcctcagtgcctggtctggctgattcaagcaggagccaacattaacaaaccggattgtgagggtgaaactcccattcacaaggcagctcgctctgggagcctagaatgcatcagtgcccttgtggcgaatggggctcacgtcgataaccccaagaaaggcatcagggttctggagtggttgtttgagtgacacagcacaaggccttgatttcatcatgcttttgctgtggatgtagtgtagcttgctgaacaggtatggaagctgtctttgctgttaagtacttctcccgtttgtttatcaacctgcagctaacaggatgtctgcttttttacaggtttatttcacagagcagtgtacattcttgtcttccaggggaacttcaacatggagttacttttgatccctcagttttaattcagtgtctaaaggtttacaagttcaacttactctattttattcagctctttcacttactctgccatcacttcctacttgaatctgagttttagctactgtagaggtctcagacctttcctttttagtactattagccaggtaaaactttggttcttgtgagtggtagggatgagtttttaggacagtattcaaagcctttttaaaggaaccaactactcaaatgctctacaatgccaaaaatacaatactcctgcaggttttcccaagcaaggccaaaacaatcaaaatctgacagaaaaacacagctgttcagctctggaatctgatgataggctactttttaatgtcaggacatccttctaaacttccacttacagtgtcacatgtaagcatgaaggctggctcgttggtgagccattgctttgtttttaggaagacagttatgaatgccatggacaatctcagtacatgttgtttgttatgattttattcacgctaaaggaatgggtattaaaattaagtgcatataatatagaattcagtttcaagtctgaagttagcgtaaatttagattcttcagactaacataaaacatgattttgagaagttaaataggaagatgccttttttagaagtttagcatatttagtttatctcccaaatcttgcttagaaatcaaatgtatataagagaagttagttacagagctagattgattaactacttctttaatgaagatttgctatgaatttgtttactctttcataccaccttcagatagctagtcagttcagcaggagcagagaccaggttagcacgcggatggggtgtaattcagtgtttttgtgttgtacagcctgagaaatgccagtggcctgacagcagcagacattgcacaaacccagggtttccaagagtgtgcccagtttctcttgaacctccagaattgtcatctgaaccatttctataacaatggcatcttaaatgggggtcatcagaatgtatttcctaatcatattagtgtgggaacaaatcgaaagagatgcttggaagactcagaagactttggagtaaagaaagctagaactgaaggtgagaccgctttgcgggtgggaagagcacacttatttttcctttctgtaatatgttttctttttatggctgagcgcaccttcgagatgagaccttcacttcaggtggtaatgcgcctggtggattgtgcggtgacggtggagatttctcctgtactgccactgcgaagatgggacttaacaaaagggaatgtgagggaaatactgatggcccaagtgtaaatgtctatgtggaactttttgagcacccatgtttacctgccgtgaattagattttttaatttgttgtatctgtttgaaatatatctattaaaaaaaatctgccactgaaaaaaaaaa

SEQ ID NO: 668 - DNA, 1156 bp, Homo sapiens
cagttttcaaaggttaagtaagcactgaagtgtgaatacattaagagaaagatatgtaattaaaaatccactaccaaaaataaatatgagatatatgtgtatgactaatatgccagatttacttttggagacttgtctgagtattatgaatttttgtaagaaattcctaagaatctttctaatcttagcagttttcattaatgaaatggtttttgaaggatttagcaggaaatacatataacttttgaaacttatgtttatagctgaacttggtgactatgatcttgctgagcatagtcctgaacttgtctcagagttcagattcgtgcctattcagactgaagagatggaactggctatttttgagaaatggaaggaatacagaggtcaaacaccagcacaggctgaaaccaattatctgaataaagccaaatggctagaaatgtatggggttgatatgcatgtggtcaaggctagagatgggaatgactatagtttgggactaacaccaacaggagtccttgtttttgaaggagataccaaaattggcttatttttttggccgaagataaccagattggattttaagaagaataaattaaccttggtggttgtagaagatgatgatcagggcaaagaacaggaacatacatttgtctttagactggatcatccaaaagcatgcaaacatttatggaaatgtgctgtggagcatcatgctttcttccgccttcgaggccccgtccaaaagagttctcatcgatcaggatttattcgactaggatcacgatttagatatagtgggaaaacagagtatcagaccacaaaaaccaataaagcaagaagatcaacatcctttgaaagaaggcccagcaaacgatattctagacgaactctacaaatgaaagcatgtgctacaaaacctgaagaacttagtgttcacaataatgtttcgacccaaagtaatggctcccaacaggcttgggggatgagatctgctctgcctgtgagtccttccatttcctctgctcctgtgccagtggagatagagaatcttccacagagtcctggaacagaccagcatgacaggaaatggctctctgctgccagcgactgctgtcaacgtggtggaaaccagtggaacacaagggccttg

SEQ ID NO: 669 - DNA, 539 bp, Homo sapiens
aagaatccagatggtggccttttgggggcattaggatccttcttcttgcctcccttagctggtccataatccttcatttcccgatcatagcacacttcatccgcctttgccatttcaccaaatttaaatttctctttactggacattgtcttccacctcccagagcatttcttggaaaattctgcaaaattgacagggacttctgggtttttcttcttatgttcttctctgcattggaacaggaattaaaagaaattaaagaggccgggcgcagtggctcacgcctgtaatcccagtaatttgggaggccaaggcgggcggatcacctgaggtccagagttcaagaccagcctgaccaacatggagaaaccctgtctctactaaaaatacaaaaaattagccgggtgtggtggtgcatgcctgtagtcccagctactccggaggctgaggcaggagaatggcttgagcctgggaggcggaggttgctgtgagccgagatcgcacctttgcactctagcctgggcaacaagagcgagact

SEQ ID NO: 670 - DNA, 682 bp, Homo sapiens
ctgggggtcctggctgaactggtctggtgttaagggggccccctgacccccttgaagggggggctgggctgggtgagggggggtggccgacccccagccaggttcccaggcaggatgagctggggttggggtggctaggccgagggccttgggagctgggcagtctgggctgggctgggctgggcagggcgccacatggaagctggaggagcaacgggagcgctgggcgtggggagcaaattgcccagtgccttctgtttcccaggcagctctgtggccatggatatgttccagaaggtagagaagatcggagagggcacctatggggtggtgtacaaggccaagaacagggagacagggcagctggtggccctgaagaagatcagactggatttgtgagtgctgggacggcccctgagttacccaccctgggccatcacaacctgggcgctccctgatccgttccctctttcctggagtccacgtttaactcctctgggtgctgcccagcagcccttacctgtcctctccccagttcactgccttctgaccagcctttgccggggccctgactgtggagtttggtggatgacgtgccaaggagcacaggtctccattgccggggccctggtcattctgtggggttaaggagaagccgatccccctggctggaagtgccctt

SEQ ID NO: 671 - DNA, 536 bp, Homo sapiens
gcctgtgtgtctctgtgctttgctccttctcctacctccaaaatggctggactgcctccgatccagttcatggctactggttcaggggcaggggaccatgtaagccggaacattccagtggccacaaacaacccagttcgagcagtgcaggaggagactcgggaccgattccacctccttggggacccacagaacaaggattgtaccctgagcatcagagacaccagagagagtgatgcagggacatacgtcttttgtgtagagagaggaaatatgaaatggaattataaatatgaccagctctctgtgaatgtgacagcgtcccaggacctactgtcaagatacaggctggaggtgccagagtcggtgactgtgcaggagggtctgtgtgtctctgtgccctgcagtgtcctttacccccattacaactggactgcctctagccctgtttatggatcctgggtcaaggaaggggccgatataccatgggatattccagtggccacaaacaccccaagtggaaaagtgcaagagga

SEQ ID NO: 672 - DNA, 1038 bp, Homo sapiens
tttcgtccctggagctggcgaggtgtccggttgcggagccggcggcgtctctggaaatgcatcctgcatccccgcatggataacagctgcagctatgtcagaattgcacaaagaggggagagtgtcattgtgtgccttttgacacatacattaagaccaaaaaggaaaaaaagcgtctatctgtgctgccaccgaccagactcatggaggccagattttctccaattaaccagatcttgccctggtgcagacaagacttagccatcagcatcagcaaagccatcaacacccaggaggcccccgtgaaggagaagcacgcccggcgcatcattctgggcacacaccacgagaagggggctttcaccttctggtcctatgccattgggctgccgctgcccagcagctccattctcagctggaagttctgccacgtcctccacaaggtccttcgagacgggcaccccaatgtgctgcatgactgccagcggtaccgcagcaacatccgggagattggagacctgtggggacatttgcatgaccgctacggacagctggtgaatgtctacaccaagctgctgctgaccaagatctccttccacctcaagcatccccagtttcccgcgggcctggaggtgacagatgaggtactggagaaggcagctgggaccgatgtcaacaacatgtgagtcactctgcatggctacatggccagttcccctcggcttccccattccttcctaccgcgtctcacgcccaggcgtccgcatggggcagtggggttgaatgagtccgtggctttgttggttgatgctcacgctcccagggacagagggtgaagttaaaagggtggggtgtacttgaaggactgtcgtcctggcagaggcacgctgtctcaccagagccatggtgtcggcggtgcccccgtccccactggagggggcgtctcaagacgagtgggtgggtccacccaccctttttcatttcttcccccacttctcttgcgtagcttccagctcactgtggagatgtttgattacc

SEQ ID NO: 673 - DNA, 676 bp, Homo sapiens
tttcgtccgggcggtcgcattgttttcctccgcggatccgcggctggacttggacccagggctctcccgacagcgccctggaacccaaattcaagcaccatccaattcggacgctcatcgcatctcgcctgagcacaaccacggattgcgaactcagcgcagcgcgtggccgctggccgcccgcggcgatctcgatcccgctgacccgaatcctggagtcagaggtttcctatccccctcaagcccccacaggagtcaccaacccagggccggcttatgggtgagggggcaccccctggggcctgagctgccccgcacaggatgccccgtgccccccacttcatgcccttgctgctactgctgctgctgctctcacttccccatactcaggccgcctttccccaggaccccctccctctgttgatctctgaccttcaaggtacttccccattatcctggcttccgagcctggaggatgatgctgtggctgcataacttgggctggactttcagagattcctgaccttgaaccggaccttgctagtggctgcccgggatcacgttttctccttcgatcttcaagccgaagaagaaggggaggggctggtgcccaacaagtatctaacatggagaagccaagatgtggagaactgtgctgtacggtgaaagctgacgg

SEQ ID NO: 674 - DNA, 418 bp, Homo sapiens
tctcttcatacagacacacgtgacatttggtgccaaagacccgggggagggggactccttcgggagaccagtcccctgtcctcaccctcactccatgaggagatccacctaccatcttgggtcctcagaccaaccagcccaaggaacatctcaccaatttcaaatcaggtaagcggtcttttcactctcttctccaacctctcttgctgttgctccacccttcaatctctcccttccttaattttggttcctttccctttctggtagagacagaagagacgtgttttatccataaactcaaaactccagcgctggtcactccagacagtcttccgttggtgtttaatcactgtggggatgcctgcctgattattcacccacatttcagggatgtcgaattccaccacacgggtaatac

SEQ ID NO: 675 - DNA, 1423 bp, Homo sapiens
tgctgttcaacaaaaaacatatcaggggacaaagcatgtaacttgatgatcttcgacactcgaaaaacagctagacaacccaactgctacctatttttctgtcccaacgaggaagcctgtccattgaaaccagcaaaaggacttatgagttacaggataattacagattttccatctttgaccagaaatttgccaagccaagagttaccccaggaagattctctcttacatggccaattttcacaagcagtcactcccctagcccatcatcacacagattattcaaagcccaccgatatctcatggagagacacactttctcagaagtttggatcctcagatcacttggagaaactatttaagatggatgaagcaagtgcccagctccttgcttataaggaaaaaggccattctcagagttcacaattttcctctgatcaagaaatagctcatctgctgcctgaaaatgtgagtgcgctcccagctacggtggcagttgcttctccacataccacctcggctactccaaagcccgccacccttcttacccaccaatgcttcagtgacaccttctgggacttcccagccacagctggcccaccacagctccacctgtaaccactgtcacttctcagcctcccacgaccctcatttctacagtttttacacgggctgcggctacactccaagcaatggctacaacagcagttctgactaccacctttcaggcacctacggactcaaaaggcagcttagaaaccataccgtttacagaaatctccaacctaactttgaacacagggaatgtgtataaccctactgcactttctatgtcaaatgtggagtcttccactatgaataaaactgcttcctgggaaggtagggaggccagtccaggcagttcctcccagggcagtgttccagaaaatcagtacggccttccatttgaaaaatggcttcttatcgggtccctgctctttggtgtcctgttcctggtgataggcctcgtcctcctgggtagaatcctctcggaatcactccgcaggaaacgttactcaagactggattatttgatcaatgggatctatgtggacatctaaggatggaactcggtgtctcttaattcatttagtaaccagaagcccaaatgcaatgagtttctgctgacttgctagtcttaggaggttgtattttgaagacaggaaaatgcccccttctgctttccttttttttttttgaaacagagtcttgttttgttgcccaggctggagggcagaaccacaatttgggttttaaccgaaccctccgtttcttgggttaaagcaattctcctgcctcaccctcctaagaatctggaattacgggcatgggccaccaccccggggggatttttggatttttagtaaagacggggtttcaccat

SEQ ID NO: 676 - DNA, 621 bp, Homo sapiens
cggggaggtaccaggtatttgagagcaatcgccaccgctttcctggaacttgaggctggagtgcagcggtgtgatctcggtttactgcaacctccacctcctgagttccagcgattctcctgcctcagcctcctgagtagctgggattacagtaaatacaatcaaggggcatcttaaatttttgctggaagtggagtcatgagactaaagatatctcttttaaaagaaccaaagcatcaagaattagtaagctgtgtgggctggactactgctgaagagctgtattcatgtagtgatgatcaccacatagtgaagtggaacttgttaaccagtgaaacaactcaaatagtaaagcttcctgatgatatttaccctattgattttcactggtttccaaaaagtttgggtgtaaagaaacaaacccatgcagaaagctttgtcctcacaagttctgatggtaaatttcatctgatttccaagttaggaagagtggaaaaaagtgtagaagctcactgtggagcagtacttgcaggaagatggaattatgaaggaacagcattagttacagttggagaagatggacaaatataaatttggtcaaagactgggatgcttatatct

SEQ ID NO: 677 - DNA, 1258 bp, Homo sapiens
cccgggtcgacgatttcgtgcggcgggctatccggtcctcggctgcggcgggcaccatggtcggtggcgaggcggctgccgcagtggaggagctggtttcgggggtgcggcaggcggccgacttcgcggagcagttccgctcctactcagagagcgagaagcaatggaaggcccgcatggaattcatcctgcgccacctgcccgactaccgcgacccgcccgacggcagtggccgcctggaccagctgctctccctctccatggtctgggccaaccatctcttcctaggctgcagttacaataaagaccttttagacaaggtgatggaaatggccgatgggattgaagtggaagacctgccacaatttactaccagaagtgaattaatgaaaaagcatcaaagctaagccagaagatttatcacattttcatcatcagctacaggattagaaaggaggctgggatgaatgtgacatagaccacagcagctctcttaagactcctggtattaccaacataaagaggcaggtggaatgagaaggactctgtctagattggcttttttaacattctcattttcccaggagttatcactgtaaaagtatgcatggatatttatgtatttataaatcatgcactctaagatgagttcatcaacattgtaaaagccctcttttctgttttcaggtttttttttttcttatcgacaaggtctcactctgtcgcccaggcagaagcacaaaggtgcagtattggctcattgcagcctcgaactcctgggctcatattttcagggttttttgttttttgttttgtttttttgagacagagtcttgctctgttgcccaggcagtagtgcagtggcgcgatatattttcagtttttaaacgtcagaatttttgtttaaaatgcctttttgggctgggcacagtggcttatgcccataataatcccagcactttgggaggccgaggtgagcagatcacctgaggttaggagtttgagaccagcctggccaacacgatgaaaccccgtctctactaaaaatacaaacaaaattagctgggcatggtggcggacatctgtaatcccagctactcaggaggctgaagcagaagaactgcttgaacctgggaggtggaggttgcagtgagccaagatcgcaccattgcactccatcctgggcgacaaaaatgaaacaccgtctcaaaaaaaataaaaataataaaataaaatgcctttttgttgttgctcgtgc

SEQ ID NO: 678 - DNA, 1289 bp, Homo sapiens
  misc_feature (1)...(1289): n = a,t,c or g
cgccaccggtatgcaccattaccatccccgcggctcagtcgagcattcgtccacgggccggagggcggggcgcccgggtccggagggagccacgcccnaccacaacaaacgcgtctgcgcatgcccgggcgctgggttcaggggctttccgccgctctgggttcacagctggacgtcgggagtgctagtttggagtacgccatttgagagtaggcgtgagaagttgctctgtgtgctgagcgttctaaaggaaggcgtccgttggccttcgtacccgtcttgagtgaggtgacgagtgttttctagtactggggtcggccgcgcagccctctcaggggtgggtggcaggaagagtgccgggtcccgcgtggtgcaaaaggtgggttcaggtttgcggccacacagcgctactcaggactttttagtcttgtttattttctccgtgcctgttcccgccccccgcagctccacctctgggagaggggcgggttcagctccaggaggcggggacttcccggcttggcgtggctggggtgtcccgtggaccccagtctcggcgcggtgacccacttatgggacttggcctttctttgttgtttgtttaaggcagggtttctcagcctgggcactactgaggttttgggccggctaattctgtctgggttggggagggtgctgtcccgtgcttcgcaggttgtgtagctgcatcccccgcctctacccagtggatgcaagtagcagccccagtgaaccaaaaatgcccccagactttgccaaatatcccctcccggggaagatcgcctcgcttgagaaccactgttggaggagagcctgggttttcgggaggtaaccgtttacaaaggggagaacggtaagaagccggaagcaacgatgacttagctacgtgaaagacttgcggccgggctcgcccctcttctagaagccgtcagtttgggtctcgcgtctggaatcaccgtcaaggagtcagatccagccccggagagggagcagggtcgaggtctccttgcagaaggcgccaccgcaggaagcacaggcgcaacgtgcagtctccctagcggaggcgctcgcgatcctgcagccgccggtccgggaggtgctcggtagccctccttggtgcctgtccggtagctggtcactctcgggggaaggtcgtgtgcagaagggcacatgcgatcacacagagacggcgttgctgcggctttgacccgatggtgcacccgaaagaacacagagggtgaagggagagatccaggaagtggtcgcggagc

SEQ ID NO: 679 - DNA, 539 bp, Homo sapiens
agtctcgctcttgttgcccaggctagagtgcaaaggtgcgatctcggctcacagcaacctccgcctcccaggctcaagccattctcctgcctcagcctccggagtagctgggactacaggcatgcaccaccacacccggctaattttttgtatttttagtagagacagggtttctccatgttggtcaggctggtcttgaactctggacctcaggtgatccgcccgccttggcctcccaaattactgggattacaggcgtgagccactgcgcccggcctctttaatttcttttaattcctgttccaatgcagagaagaacataagaagaaaaacccagaagtccctgtcaattttgcagaattttccaagaaatgctctgggaggtggaagacaatgtccagtaaagagaaatttaaatttggtgaaatggcaaaggcggatgaagtgtgctatgatcgggaaatgaaggattatggaccagctaagggaggcaagaagaaggatcctaatgcccccaaaaggccaccatctggattctt

SEQ ID NO: 680 - DNA, 349 bp, Homo sapiens
ttagaagtgagttaaattttcacattcccaagggtacttttgtctcgggttgttgaatatattttaaagtgtttataataatcacttcaaaatatttaggtaattaactgtaaattatgttttggtattctccagggacagtggccttagagctattgagaatttgatgcaaaagaaggggaaatttgattacatactgttagagaccactggattagcagaccctggtaagaagtgagattattaataaccagaatatagttctgtgatatattgtaaatagatgtattagaggaatatctaaaatgaggattaaagcttttgttagtattaaaccaaaaactttttt

SEQ ID NO: 681 - DNA, 329 bp, Homo sapiens
ggcacgaggcggcgctgtgtcggacccgtgctgtggctgccgagaggcattttctgcgagtgtttctcttcttcaggccctttcggggtgtaggcactgagagtggatccgaaagcggaagttccaaagccaaggagcctagaacgccctcaagcagctacgggaccgcccaataccgacgctggccaatagcccaggagtataaacactgcaccgcgcacaatgacacaggcactctctgctccgagctgagagaaccatggaggagaccgcagtagacagagccactgaactcatgacaacgtgaagcgaactagaaagtaatactc

SEQ ID NO: 682 - DNA, 574 bp, Homo sapiens
acgagggctccagtcaggccaatacgctccgctcacggaaggaaaacagaaataacttgctggcttgtctggagtcacatgtacttaggtgacaatttacagaaagtcatctctgcagcttgatgggcgacaacccttttcaaccaaaaagtaattcaaaaatggcagaactgtttatggaatgtgaagaagaggagctggaaccatggcagaagaaagtaaaagaagttgaggatgacgatgatgatgagccaatctttgttggcgagatatcaagttcaaaaccagcaatttcaaatattttgaacagagttaaccccagctcatattcaaggggactaaagaatggtgcactcagtcgaggtattactgctgcattcaagcctacaagtcaacactacacgaatccaacatcaaatccagtgcctgcctcaccaataaattttcatcctgagtctagatcttcagatagttctgttattggtcagcctttttctaaacctgtaagtgtttctaaaactatacggccagctcagggatccattggatgttgtttatcaatatcaacagtacc

SEQ ID NO: 683 - DNA, 627 bp, Homo sapiens
cttgatgtttttcacttgaagacattttgaactttttcttacagggtttctctgctgggctgtttgcattctaccatgataaagatggaaatcctctcacttcaagatttgcagatggcctcccaccttttaattatagtctgggattatatcaatggagtgataaagtagttcgaaaagtggagagattatgggatgttcgagataataagatagttcgtcacactgtgtatctcctggtaacgcctcgtgttgttgaggaagcacgaaaacattttgattgtccagttctagagggaatggaacttgaaaatcaaggtggtgtgggcactgagctcaaccattgggaaaaaaggttattagagaatgaagcgatgactggttctcacactcagaatcgagtactctctcgaatcactctggcattaatggaggacactgggagacagatgctgagcccttactgtgacacgctcagaagtaacccactgcagctaacttgcagacaggaccagagagcagttgccgtggtgtaatttgcagaagttccctaagcctttaccacaggaataccagtactttgatgaactcagtggaatacctgcagaagatttgccttattatggg

SEQ ID NO: 684 - DNA, 1271 bp, Homo sapiens
gcggcgcgccgccgcagacagctggtgtcccgccggagaacggccgagatatccccgccggcggaggagcagccccagcgccaggcctcccgacgtccccgggcagcagcccaaggccgcgaagtccccgtctccagttcagggcaagaagagtccgcgactcctatgcatagaaaaagtaacaactgataaagatcccaaggaagaaaaagaggaagaagacgattctgccctccctcaggaagtttccattgctgcatctagacctagccggggctggcgtagtagtaggacatctgtttctcgccatcgtgatacagagaacacccgaagctctcggtccaagaccggttcattgcagctcatttgcaagtcagaaccaaatacagaccaacttgattatgatgttggagaagagcatcagtctccaggtggcattagtagtgaagaggaagaggaggaggaagaagagatgttaatcagtgaagaggagataccattcaaagatgatccaagagatgagacctacaaaccccacttagaaagggaaaccccaaagccacggagaaaatcagggaaggtaaaagaagagaaggagaagaaggaaattaaagtggaagtagaggtggaggtgaaagaagaggagaatgaaattagagaggatgaggaacctccaaggaagagaggaagaagacgaaaagatgacaaaagtccacgtttacccaaaaggagaaaaaagcctccaatccagtatgtccgttgtgagatggaaggatgtggaactgtccttgcccatcctcgctatttgcagcaccacattaaataccagcatttgctgaagaagaaatatgtatgtccccatccctcctgtggacgactcttcaggcttcagaagcaacttctgcgacatgccaaacatcatacagatcaaagggattatatctgtgaatattgtgctcgggccttcaagagttcccacaatctggcagtgcaccggatgattcacactggcgagaagccattacaatgtgagatctgtggatttacttgtcgacaaaaggcatctcttaattggcacatgaagaaacatgatgcagactccttctaccagttttcttgcaatatctgtggcaaaaaatttgagaagaaggacagcgtagtggcacacaaggcaaaaagccaccctgaggtgctgattgcagaagctctggctgccaatgcaggcgccctcatcaccagcacagatatcttgggcactaacccagagtccc

SEQ ID NO: 685 - DNA, 685 bp, Homo sapiens
  misc_feature (1)...(685): n = a,t,c or g
atgagggtcgtcccacgcgtccgcttggtccatgtgagagaagctggctgctgaaatgactgcgaaccggcttgcagagagccttctggctttgagccaacaggaagaactagcggatttgccaaaagactacctcttgagtgagagtgaagatgagggggacaatgatggagagagaaagcatcaaaagcttctggaagcaatcagttcccttgatggaaagaataggcggaaattggctgagaggtctgaggctagtctgaaggtgtcagagttcaatgtcagttctgaaggatcaggagaaaagctggtccttgcagatctgcttgagcctgttaaaacttcatcttctttggccactgtgaaaaagcaactgagtagagtcaaatcaaagaagacagtggagttacctctgaacaaagaagagattgaacggatccacagagaagtagcattcaataaaaccgcacaagtcctctccaaatgggaccctgtcgtcctgaagaaccggcaggcagagcagctggttnttcccctggagaaagaggagccagccattgctcccattgaacatgtgctcagtggctggaaaggcagaactcccctggagcangaaattntcaacctnctncatangaacaagcagncagtgacagaccctttactgacccctgtggaaaggcct

SEQ ID NO: 686 - DNA, 962 bp, Homo sapiens
cgcggccgcgtcgactttaagattaaattcatgtattgaaaatattgttcagaccccatgtgacataactggagccagtgcagtgccatgaagaactacgagattagcctggatattaacttgtcttctagagaatagatttcatgttccattcttctgcaatggttaattcacacagaaaaccaatgtttaacattcacagaggattttactgcttaacagccatcttgccccaaatatgcatttgttctcagttctcagtgccatctagttatcacttcactgaggatcctggggctttcccagtagccactaatggggaacgatttccttggcaggagctaaggctccccagtgtggtcattcctctccattatgacctctttgtccaccccaatctcacctctctggactttgttgcatctgagaagatcgaagtcttggtcagcaatgctacccagcttatcatcttgcacagcaaagatcttgaaatcacgaatgccacccttcagtcagaggaagattcaagatacatgaaaccaggaaaagaactgaaagttttgagttaccctgctcatgaacaaattgcactgctggttccagagaaacttacgcctcacctgaaatactatgtggctatggacttccaagccaagttaggtgatggctttgaagggttttataaaagcacatacagaactcttggtggtgaaacaagaattcttgcagtaacagattttgagccaacccaggcacgcatggctttcccttgctttgatgaaccgttgttcaaagccaacttttcaatcaagatacgaagagagagcaggcatattgcactatccaacatgccaaaggttaagacaattgaacttgaaggaggtcttttggaagatcactttgaaactactgtaaaaatgagtacataccttgtagcctacatagtttgtgatttccactct

SEQ ID NO: 687 - DNA, 676 bp, Homo sapiens
accgatcgaagatccctcggagcgacccacgcgtccggacgccagcgcctgcagaggctgagcagggaaaaagccagtgccccagcggaagcacagctcagagctggtctgccatggacatcctggtcccactcctgcagctgctggtgctgcttcttaccctgcccctgcacctcatggctctgctgggctgctggcagcccctgtgcaaaagctacttcccctacctgatggccgtgctgactcccaagagcaaccgcaagatggagagcaagaaacgggagctcttcagccagataaaggggcttacaggagcctccgggaaagtggccctactggagctgggctgcggaaccggagccaactttcagttctacccaccgggctgcagggtcacctgcctagacccaaatccccactttgagaagttcctgacaaagagcatggctgagaacaggcacctccaatatgagcggtttgtggtggctcctggagaggacatgagacagctggctgatggctccatggatgtggtggtctgcactctggtgctgtgctctgtgcagagcccaaggaaggtcctgcaggaggtccggagagtactgagaccgggaggtgtgctctttttctgggagcatgtggcagaaccatatggaagctgggccttcatgtggca

SEQ ID NO: 688 - DNA, 639 bp, Homo sapiens
cggacgcgtgggcgtatttgcgcgtatgagatgcattgtctcttcctctggagttgagctgaatgaatacctccgaagccgttttgttctccaaatgggaatagctccactataccagcctcgtcttccttccgggggacaacgtgggtcagggcacagagagatatttaatgtcaccctcttggggctttcatgggactccctctgccacattttttggaggttgggaaagttgctagaggcttcagaactccagcctaatggatcccaaactcgggagaatggctgcgtccctgctggctgtgctgctgctgctgctgctggagcgcggcatgttctcctcaccctccccgcccccggcgctgttagagaaagtcttccagtacattgacctccatcaggatgaatttgtgcagacgctgaaggagtgggtggccatcgagagcgactctgtccagcctgtgcctcgcttcagacaagagctcttcagaatgatggccgtggctgcggacacgctgcagcgcctgggggcccgtgtggcctcggtggacatgggtcctcagcagctgcccgatggtcagagtcttccaatacctcccgtcatcctggccgaactggggagcgatcccacgaaaggct

SEQ ID NO: 689 - DNA, 116 bp, Homo sapiens
ttttttttttttgagatggagtcttgctctgtcacccaggctggagtgccgtggcacgatctcagctcactgcaacctccacctcccaggttcaagcgattctcgtgcctcagcct

SEQ ID NO: 690 - DNA, 509 bp, Homo sapiens
acaaacaggtggggtcaagcacggagagagaactgcccagggtataaaaagggcccacaggagaccggctctaggatcccaaggcccaactccccgaaccactcagggtcctgtggacagctcacctagtggcaatggctccaggctcccggacgtccctgctcctggcttttgccctgctctgcctgccctggcttcaagaggctggtgccgtccaaaccgttccgttatccaggctttttgaccacgctatgctccaagcccatcgcgcgcaccagctggccattgacacctaccaggagtttgaagaaacctatatcccaaaggaccagaagtattcattcctgcatgactcccagacctccttctgcttctcagactctattccgacaccctccaacatggaggaaacgcaacagaaatccaatctagagctgctccgcatctccctgctgctcatcgagtcgtggctggagcccgtgcggatcctcatgagtatagtccccaac

SEQ ID NO: 691 - DNA, 1362 bp, Homo sapiens
tttcgtgaaacttatcaagaaacaccaggctgctatggagaaagaggctaaagtgatgtccaatgaagagaaaaaatttcagcaacatattcaggcccaacagaagaaagaactgaatagttttctcgagtcccagaaaagagagtataaacttcgaaaagagcagcttaaagaggagctaaatgaaaaccagagtacccccaaaaaagaaaaacaggagtggctttcaaagcagaaggagaatatacagcatttccaagcagaagaagaagctaaccttcttcgacgtcaaagacaatacctagagctggaatgccgtcgcttcaagagaagaatgttacttgggcgtcataacttagagcaggaccttgtcagggaggagttaaacaaaagacagactcagaaggacttagagcatgccatgctactccgacagcatgaatctatgcaagaactggagttccgccacctcaacacaattcagaagatgcgctgtgagttgatcagattacagcatcaaactgagctcactaaccagctggaatataataagcgaagagaacgagaactaagacgaaagcatgtcatggaagttcgacaacagcctaagagtttgaagtctaaagaactccaaataaaaaagcagtttcaggatacctgcaaaatccaaaccagacagtacaaagcattaagaaatcacctgctggagactacaccaaagagtgagcacaaagctgttctgaaacggctcaaggaggaacagacccggaaattagctatcttggctgagcagtatgatcacagcattaatgaaatgctctccacacaagccctgcgtttggatgaagcacaggaagcagagtgccaggttttgaagatgcagctgcagcaggaactggagctgttgaatgcgtatcagagcaaaatcaagatgcaagctgaggcacaacatgatcgagagcttcgcgagcttgaacagagggtctccctccggagggcactcttagaacaaaagattgaagaagagatgttggctttgcagaatgagcgcacagaacgaatacgaagcctgttggaacgtcaagccagagagattgaagcttttgactctgaaagcatgagactaggttttagtaatatggtcctttctaatctctcccctgaggcattcagccacagctacccgggagcttctggttggtcacacaaccctactgggggtccaggacctcactggggtcatcccatgggtggcccaccacaagcttggggccatccaatgcaaggtggaccccagccatggggtcacccttcaaggcccaatgcaaaggggtacctcgaggagcagtatgggagtccgct

SEQ ID NO: 692 - DNA, 503 bp, Homo sapiens
gatcacgtgggcagctccgggcgcggcgcttgttttggtttccttctaacttgcccacggcagcttcggggtgagcgactttcctgcaccagctgccgcgcctgctcacaccctgacctcgttttcgggctctctgagcccgcagttccgcaagcccctggggcgggctcctgccatgccgctagtccgctacaggaaggtggtcatcctcggataccgctgtgtagggaagacatctttggcacatcaatttgtggaaggcgagttctcggaaggctacgatcctacagtggagaatacttacagcaagatagtgactcttggcaaagatgagtttcacctacatctggtggacacagcagggcaggatgagtacagcattctgccctattcattcatcattggggtccatggttatgtgcttgtgtattctgtcacctctctgcatagcttccaagtcattgagagtctgtaccaaaagctacatgaaggccatgggaaaa

SEQ ID NO: 693 - DNA, 1671 bp, Homo sapiens
gcggcttgtgtccacgggacgcggtacggatgcttctccggccatgaggaaaccagccgctggcttccttccctcactcctgaagggtgagaggtttacacctgctccaacagactctccccgggctagtcctctccctcccgagagctctgcttttacggtttctggatcgcttcctcatggtggtcgcgctgggtcggctccctaggtcctgggatactcccatctccccccgcccgcggccggacctttgcctctgtctctagactccccccgccctggtcagcagggataaccctcaccccgttcctaatttgccagtctgggtctgtctgccctggtctcggagcgggttttggggttcggtcctttcatcatccggtcgcccgctccgcagtgctgctcctgcctctggcacctgccgcagcccaggattcgactcaggcctccactccaggcagccctctctctcctaccgaatacgaacgcttcttcgcactgctgactccaacctggaaggcagagactacctgccgtctccgtgcaacccacggctgccggaatcccacactcgtccagctggaccaatatgaaaaccacggcttagtgcccgatggtgctgtctgctccaacctcccttatgcctcctggtttgagtctttctgccagttcactcactaccgttgctccaaccacgtctactatgccaagagagtcctgtgttcccagccagtctctattctctcacctaacactctcaaggagatagaagcttcagctgaagtctcacccaccacgatgacctcccccatctcaccccacttcacagtgacagaacgccagaccttccagccctggcctgagaggctcagcaacaacgtggaagagctcctacaatcctccttgtccctgggaggccaggagcaagcgccagagcacaagcaggagcaaggagtggagcacaggcaggagccgacacaagaacacaagcaggaagaggggcagaaacaggaagagcaagaagaggaacaggaagaggagggaaagcaggaagaaggacaggggactaaggagggacgggaggctgtgtctcagctgcagacagactcagagcccaagtttcactctgaatctctatcttctaacccttcctcttttgctccccgggtacgagaagtagagtctactcctatgataatggagaacatccaggagctcattcgatcagcccaggaaatagatgaaatgaatgaaatatatgatgagaactcctactggagaaaccaaaaccctggcagcctcctgcagctgccccacacagaggccttgctggtgctgtgctattcgatcgtggagaatacctgcatcataacccccacagccaaggcctggaagtacatggaggaggagatccttggtttcgggaagtcggtctgtgacagccttgggcggcgacacatgtctacctgtgccctctgtgacttctgctccttgaagctggagcagtgccactcagaggccagcctgcagcggcaacaatgcgacacctcccacaagactccctttgtcagccccttgcttgcctcccagagcctgtccatcggcaaccaggtagggtccccagaatcaggccgcttttacgggctggatttgtacggtgggctccacatg

SEQ ID NO: 694 - DNA, 898 bp, Homo sapiens
  misc_feature (1)...(898): n = a,t,c or g
ttttttttttttgtgacagtttctccactttattagcctggagctcctccctgccagccccaggggctggtcgctggtccctgggcacagtgagcagggctgaggtcagacgggttcggcccttggccatggcagcttggttgggacagccgggccaagggaaaaaaaggtgcaaaagtccaaatgctggcacttcaggtgtggccggcacccagccaggcgcagtgggtgggcagggcgccatgcttctctcctggcgacaggtcggccgtgtagcagcgccccctcccagcagccactaggaacagctggtgattctcgccaggaactgctgcgcccaccactcgtctaggtcaatggggcacaaagttctgcagccggggattgggggtcctctccacgtactgcacaggccttggcccgccctcaccggctgggccaccatccagctgctgttgcacctgctgccaggcttcggacacaaagcggacattctcctcgtgggccactgtgtaggtctcctgggtcccctcgaaggatggggacgtggagggggcccgccggccattcacacgattgaacacaagccttggccctggactgcaggaagggaggagacggacatggttggtgcccatcccaggtgcggtgctgcctggcagaactcaggagcagccccgggccagcccactttccccagacttggccagcctaggcacttcctgaaccagagagagcagccacccacagcagccggtggcccaggcctctcttgcagtccccaagccatcggcagctcagctcacacctgcagccctgtgtcctgagggaagtgagtgactgtagggggganatgcnccgcctagaggttcgatcggtggaaagacagccgggcccc

SEQ ID NO: 695 - DNA, 630 bp, Homo sapiens; identical to SEQ ID NO: 604

SEQ ID NO: 696 - DNA, 879 bp, Homo sapiens
tttcgtctgaagcacagacaccacttccccaatctacaggagccattttaacagctaaaacttgtcggattgctttttattttcaagctcaaaagacgatagagaaagaatacttgaaggccaagaagcttgagagaagaaaaatttcagaaaaattgtctcaatttgactagaatatcaatgaaccaggaaaactgaagcaccttccctaaagaaaacttgggtatacaattactccacagacagagctgagggttttttacccaaatcagtcactggattttgctgcctgatacgtgaatcttcttggaatttttctcatgtggatctaaggggaatgctttattatggctgctgttgtccaacagaacgacctagtatttgaatttgctagtaacgtcatggaggatgaacgacagcttggtgatccagctatttttcctgccgtaattgtggaacatgttcctggtgctgatattctcaatagttatgccggtctagcctgtgtggaagagcccaatgacatgattactgagagttcactggatgttgctgaagaagaaatcatagacgatgatgatgatgacatcacccttacagttgaagcttcttgtcatgacggggatgaaacaattgaaactattgaggctgctgaggcactcctcaatatggattcccctggccctatgctggatgaaaaacgaataaataataatatatttagttcacctgaagatgacatggttgttgccccagtcacccatgtgtccgtcacattagatgggattcctgaagtgatggaaacacagcaggtgcaagaaaaatatgcagactcaccgggagcctcatcaccagaacagcctaagaggaaaaaaaaaa

SEQ ID NO: 697 - DNA, 719 bp, Homo sapiens
ggcacgaggcgagcggagttagcagggctttactgcagagcgcgccgggcactccagcgaccgtggggatcagcgtaggtgagctgtggccttttgcgaggtgctgcagccatagctacgtgcgttcgctacgaggattgagcgtctccacccatcttctgtgcttcaccatctacataatgaatcccagtatgaagcagaaacaagaagaaatcaaagagaatataaagactagttctgtcccaagaagaactctgaagatgattcagccttctgcatctggatctcttgttggaagagaaaatgagctgtccgcaggcttgtccaaaaggaaacatcggaatgaccacttaacatctacaacttccagccctggggttattgtcccagaatctagtgaaaataaaaatcttggaggagtcacccaggagtcatttgatcttatgattaaaggtatgaaaaaatagataacttttgtcttaattttaaattatgatataaggaaaaatttgttaatactattatgaattctgccaattactgtaatctggggatagtataacagcactataaatgtttttgtatgtgaccatttgtttgacaagatccatgtgtggatgaaatgttaggaaaagggaggcccagtggaagtgggctcacacctgtaatcccagtaggctagggaggttgaagcaagaggatggcttgagtctagaagt

SEQ ID NO: 698 - DNA, 420 bp, Homo sapiens
acatttcgtgttaatggcgggcagtagccgctgaggggattgcagataaccgcttcccgcacggggaaagtctaccctgcctgccactttctgctcgccgtcagcgccggagctcgccagcatgtctgtggtaccgcccaatcgctcgcagaccggctggccccggggggtcactcagttcggcaacaagtacatccagcagacgaagcccctcaccctggagcgcaccatcaacctgtaagtgcggcgcggccttggcgggcatttctctcgtgaaagctcctatagactctccgacgcgcccccggcttttcggcgcgcttcacgcctctgcacctccccgcctccaactcccgctggcggatgcgcgccttcctccctctctcaggcccctttctcatcctccagcctccaggattc

SEQ ID NO: 699 - DNA, 422 bp, Homo sapiens
gcggaaggagaagatgtgccgccgctgccaacgtcgagcggcgacggctgggaaaaagatcttgaagaagctctggaagcaggaggttgtgatcttgaaacgttgagaaatataattcaaggaagaccgctgcctgctgatctgagggccaaagtttggaagattgctctgaatgttgcaggaaaaggtgatagtttggcatcatgggatggtattttagacttgccagaacagaacactattcacaaagattgcctgcagtttattgaccagctttcagtgccagaggagaaggcagcagaattacttttggatattgaatctgtaattaccttttattgtaaatcacgtaacattaaatatagcacatcccttagctggatacatctactgaaaccattggtgcatcttcaactgccacg

SEQ ID NO: 700 - DNA, 412 bp, Homo sapiens
cagatcactcccaaatatagccctctccagaaaccacttggatagaaaaaagtccaaagagaactgaggtgtccaacacatgagtgaggccttcctggatctctagctctcgtcaagccttcccaacaccacgaggaacaaaaatgagccatccaaatgagctttacccaaattcctgacccacggtgtcaagagcaatgaaagggttgtcgtttggctctttccgccatcttttcgtgccgccacaatggtgcacatgaatgtcctgcctgatgctctcaagagcatcaacaatgccgaaagaagaggcaaaccccaggttcttattaggctgtgctccaaaatcatcatctggtttctcactgtaatggtgaagtatggttacattggcaaatttgaacccacgcgtccg

SEQ ID NO: 701 - DNA, 977 bp, Homo sapiens
agcggccgcttgccggcgttctggctcctgtggcctcaccaggaagcgtcagagtcccgacactggggaagctcggagcgccgcctccgctgccgccgcctcctgcctggctctgggtccccgagccccctcccctggcccagcccgactccctcctccttcccgaaccatccggctcgggctccttccctggcgatggctggccgctgagccatggctcagtacggccaccccagtccgctcggcatggctgcgagagaggagctgtacagcaaagtcaccccccggaggaaccgccaacagcgccccggcaccatcaagcatggatcggcgctggacgtgctcctctccatggggttccccagagcccgcgcacaaaaagccttggcatccacgggaggaagaagtgttcaggcagcatgtgactggttattctcccatgtcggtgaccccttcctggatgaccccctgccccgggagtacgtcctctacctccgtcccaccggccccttagcacagaagctttccgacttttggcagcagtcgaagcagatctgcgggaagaacaaggcacacaacatcttcccccacatcacactctgccagttctttatgtgcgaggacagcaaggtggatgccctgggggaagccctgcagaccacggtcagtcgctggaaatgtaagttctcggccccgctgcccctggagctctatacgtcgtccaacttcatcggcctctttgtaaaggaagacagtgcggaggtcctcaagaagtttgctgctgactttgctgcagaggctgcatccaaaaccgaagtgcatgtggaacctcataagaagcagctacatgtgaccctggcttaccacttccaagccagccacctacccaccctagagaaactggcccagaacattgacgtcaagctagggtgtgactgggtggctaccatattttctcgggatatccgatttgctac

SEQ ID NO: 702 - DNA, 406 bp, Homo sapiens
ggcagacgaggccggcttctccgcggacagctagggagagtgtcctgggtgtcagccagaacatgtctttcaacctgcaatcatcaaagaaactgttcattttcttaggaaaatcactgtttagtcttctggaggctatgatttttgccttactcccaaagccacggaagaacgttgctggtgaaatagtcctcatcacaggtgctggaagtggactcggaaggctcttagccttgcagtttgcccggctgggatctgttcttgttctctgggatatcaataaggaggggaatgaggaaacatgtaagatggctcgggaagctggagccacaagagtgcacgcctatacctgcgattgcagccaaaaggaaggagtgtatagagtagccgaccaggttaaaaaaga

SEQ ID NO: 703 - DNA, 987 bp, Homo sapiens
ttttttttttttgtgtttataacaggttttactttttttcttaaaatggggatgttcttactaaataccattttatttcatttcttcacagatcttctggttcttgatcatctataattatcaagtgtcgtatatagggaacaagtattgatgttcaatatgattcaaactattactgttccatagtcagtggagctttttcaatgtccagaaagaatactttcaatctttatgaacagcctaggattttgcagttgtttctgaaggctcaaattgtcctgcttcaaatttttctttgaattttaagtagtctcttcttttatcaaaatattttatccactgttggggacaacttgattcgaaagagcttcttaacttcttgcattgagaagcatcctctaagttctcatctaaacacttccagtactcatcccgggccccccagcagacctgtctttccttcatagatggggctgccattcctactgcgatgaagctctctgcccgcccacgtccggcttcctttcgatgtcgacgggaggaaactgtcacgcaggccaccaaccggcggtggagggcgcggtgccgagtcctgccactgcagggtcgccccgctggctcaagctctagaagcgtagacctccccagccgcaaaaagcaagtcacgcggcgaaaccgcggactcttttgacccttccgagctaccatttactttccatagaggggcgggacttcctgtttcgcttttatcttgtctcgctcttccgcccagtctcgagtgcagtggtgagaacacggcttactgcagcctcaaaatcctggacccaaaagatcctcccacctcagcctgcctcccaggtagctgggactacaggcgcacaacaccatcgcttcttggattaaaagaaaaggatgaaacgggccccagaaagaggcggtgacgtcccagaacccatggcaggggagttgggaaaataaatatttgta

SEQ ID NO: 704 - DNA, 473 bp, Homo sapiens
cacctgcaccggctgcgaggagcagggagctcctcaaagagctcaggaacggacaggacatggacacagtggtctttgaagacgtggttgtggatttcacgctggaggagtgggccttgctgaatcctgctcagagaaaactctacagagatgtcatgctggagaccttcaagcacctggcctcagtagataatgaggctcagcttaaagccagtgggtctatttctcagcaggatacttctggagaaaaattatccctcaaacagaaaatagaaaagttcacaagaaagaatatatgggcctcccttttaggaaaaaattgggaagaacatagcgttaaagacaagcacaacaccaaggagagacatttgagcagaaatccaagggtggagagaccatgtaaaagcagtaaaggtaataaacgtggaagaaccttcagaaagactcgaaattgtaatcgtcatctgcgcagg

SEQ ID NO: 705 - DNA, 435 bp, Homo sapiens
  misc_feature (1)...(435): n = a,t,c or g
ttttttttttcaattatttataaaactttaatgagggagaggccctaactcttcctcagctctaccaactactgaaaggaaaagctggtgctggggagccctccacaccactgactgatgaatttcagcacgtcctggcacactgggctgtgggaggtctgtgagcaaatggaagaacatgagaggaacttgttaatgctggaaatacaaaatcagctccatcgcaggcttcagggtctgcatctgccttcctgtaatcccacccatctttntagtgtgtatgtgggttttttgtttgttttgagacaaagtcttgctttgtcgcccaggctggagtgcagtggcacaatctcagctcactgcaagctctgcctcccgggttcaagcaattctcctgcctcagcctcctcagtagctggcattataggcgcgtgc

SEQ ID NO: 706 - DNA, 894 bp, Homo sapiens
cggcacgaggttgaggcggcggcgcgaggcagtatggtttgaagtggtgaacatggatttttctcggcttcacatgtacagtcctccccagtgtgtgccggagaacacgggctacacgtatgcgctcagttccagctattcttcagatgctctggattttgagacggagcacaaattggaccctgtatttgattctccacggatgtcccgccgtagtttgcgcctggccacgacagcatgcaccctgggggatggtgaggctgtgggtgccgacagcggcaccagcagcgctgtctccctgaagaaccgagcggccaggtgagcaccgctgcacttcctctccatctgatctctaacaccagttaaaaccaagcttccatactttttggtctgtaaagccgcaccctgtctcgagcttaaggatatgtgtgtgtatgtgcgtgtacagacacacaaacctgccatataaagtggtagtttgctgcaaataaagactgaaaggaactctggaatctgtgtggcttgtctagtattgatgttctgctgttcttgtttcaagttctcttcgctggtgcacgccacgtgcagtgccagcactcaggtctggaagctttgtggtcctgtggtgggagctcagctacagctgtcctaccacatgtgtaaagaggaaggaatcttacagattacacatgctgtcgtggacgatctccgtgtccagttcattcttttttctggagacggagtctcgctcttgtcgcccagggtggaatgcagtggcacgatctcagctcactgcctcctctgtctcccgggttcaagcgattctactgcacgcagcctcctgagtagctgggattacaggcgcccgccaccacgcctgggcaacagagtgag

SEQ ID NO: 707 - DNA, 410 bp, Homo sapiens
  misc_feature (1)...(410): n = a,t,c or g
tttctgcaggactgtaaactggattcctggaacctttgatattcctggctgtgtatagtgcctgttggtggactgtactgatactcaactagagtgtgaagggactggattcctgcccctgagacacaatgcaagctgtagtgcccttgaacaagatgacagccatctcaccagaacctcaaactctggcctcgactgaacaaaatgaggtcccaagagtggttacttctggggaacaagaagctattttaagaggaaatgctgctgatgcagagtctttcagacagaggtttaggtggttttgttactcagaagtagctggacccaggaaagctctgagtcaactctgggagctctgcaatcagtggctgagaccagacattcacacgaaagaancagattttagagct

SEQ ID NO: 708 - DNA, 650 bp, Homo sapiens
gccgatttgcctgttctcacgccccaccctcagacctagccggagcaaagtttcacttatagaagggagaggagcgaacatggcagcgcgttggcggttttggtgtgtctctgtgaccatggtggtggcgctgctcatcgtttgcgacgttccctcagcctctgcccaaagaaagaaggagatggtgttatctgaaaaggttagtcagctgatggaatggactaacaaaagacctgtaataagaatgaatggagacaagttccgtcgccttgtgaaagccccaccgagaaattactccgttatcgtcatgttcactgctctccaactgcatagacagtgtgtcgtttgcaagtatgaactccaactacgctttaaaattaaataactcatataacgttaaccatttctcaatcccagaagggccaagttagtgcagtaggtacttaaataatgtgtataccttactcaggatgtctatggtagcaatactactgctcttttatagtcaattcttgattatccgtatcagtgggggaagcatggataaataattgtggtagccatcataaaagtaacttaaagatcaaacagtcatcttataaattagtatcaacttggcggggcatgggggctcatgcctgtaatccccg

SEQ ID NO: 709 - DNA, 534 bp, Homo sapiens
tttcgtggcgaacgaggccccacctctgccgggagcgggacgagcgcgcaggcgcagtctccccaggttgtagacgctgcggcccggcccggcgggtaaataacagatgcgggtgaaagatccaactaaagctttacctgagaaagccaaaagaagtaaaaggcctactgtacctcatgatgaagactcttcagatgatattgctgtaggtttaacttgccaacatgtaagtcatgctatcagcgtgaatcatgtaaagagagcaatagctgagaatctgtggtcagtttgctcagaatgtttaaaagaaagaagattctatgatgggcagctagtacttacttctgatatttggttgtgcctcaagtgtggcttccagggatgtggtaaaaactcagaaagccaacattcattgaagcactttaagagttccagaacagagccccattgtattataattaatctgagcacatggattatatggtggtatgaatgggatgaaaaaattttcacccctttgaataaaaaaggttg

SEQ ID NO: 710 - DNA, 478 bp, Homo sapiens
gattgagaccctattcgagaccatagtccatgtggtggaattctgatgtctcaactccggcctctaggaacttgaatgaggacaggagggtcagagggagagcctaggaggctgagccaaggagcgtggagaggagagacagggtgaaggtggcggctggctttctggaagcaggtggcctttggtgcggtcagcattcgtgccagccccctcttctctgatcctctccatgtgtctctctcctggaatcccagaagctgcccctgactccccattaactgcctctgcccctaccccctaggtgatgcttctgggagacacaggcgtcggcaaaacatgtttcctgatccaattcaaagacggggccttcctgtccggaaccttcatagccaccgtcggcatagacttcagggtgaggtggctgcaggcacttgcttccagcagagagccagggctgtggctcaggcatgggggggtt

SEQ ID NO: 711 - DNA, 585 bp, Homo sapiens
cttctacccccggagctcagctgatcttcccttccagactacgaggtgtgaatttcaaacttccgtaatggagttagcccacagtttattgctaaatgaagaagctttggctcaaatcaccgaagcaaaaagaccagttttcatctttgaatggttgcgatttcttgataaagtcttggttgctgccaacaaggtatggtattgctcttttttcccagttgcattaacgtgaagagattatgtggtcatgattcttaagaaaacacatgttatgttttggaaggtttatgggtcacttatggaacttgagagtattacacgaatgggaaatttagtggcaaaactcaaacctcgtttaaatccagctcattgcctatcttctttatgtttgtacctgggcagctcattgtaactggagaaaaacatggctatatgactggtgtcactttaaatttatcatcgtcacccgttgcaagtgatctctctatgctgcctaacaatcccagtgtcttcacttatctctttgaggagtcaataataggctcttttttttttaatctgttttttcttcctgcatagccttgt

SEQ ID NO: 712 - DNA, 391 bp, Homo sapiens
acaaacagagaactggttttgacagtgtttctagagtgctttttattattttcctgacagttgcgttccaccatgattactttctccttcagcgaataggctaaatgaatatgaaacagaaaagcgtgtatcagcaaaccaaagcacttctgtgcaagaattttcttaagaaatggaggatgaaaagagagagcttattggaatggggcctctcaatacttctaggactgtgtattgctctgttttccagttccatgagaaatgtccagtttcctggaatggctcctcagaatctgggaagggtagataaatttaatagctcttctttaatggttgtgtatacaccaatatctaatttaacccagcagataatgaataaaacagcacttgc

SEQ ID NO: 713 - DNA, 524 bp, Homo sapiens
atccccacagggtaatgggtgtcccgatgtcacgggggactctgtgatccgtgttcccctgaccctcctagtgcacaacttggccgggctcactgggctcctgcaccactgcctgtcaggtccgctgccagccccaagccccccaccagccatgagctcctccagaaaggaccacctcggcgccagcagctcagagcccctcccggtcatcattgtgggtaacggcccctctggtatctgcctgtcctacctgctctccggctacacaccctacacgaagccagatgccatccacccacaccccctgctgcagaggaagctcaccgaggccccgggggtctccatcctggaccaggacctggactacctgtccgaaggcctcgaaggccgatcccaaagccccgtggccctgctctttgatgcccttctacgcccagacacagactttgggggaaacatgaagtcggtcctcacctggaagcaccggaaggagcacgccatcccccacgtggttctgggccgga

SEQ ID NO: 714 - DNA, 2468 bp, Homo sapiens
gaatcgacgcacgcgtgcgcagcgctgccagcgtggaaggagctgcggggcgcgggaggaggaagtagagcccgggaccgccaggccaccaccggccgcctcagccatggacgcgtccctggagaagatagcagaccccacgttagctgaaatgggaaaaaacttgaaggaggcagtgaagatgctggaggacagtcagagaagaacagaagaggaaaatggaaagaagctcatatccggagatattccaggcccactccagggcagtgggcaagatatggtgagcatcctccagttagttcagaatctcatgcatggagatgaagatgaggagccccagagccccagaatccaaaatattggagaacaaggtcatatggctttgttgggacatagtctgggagcttatatttcaactctggacaaagagaagctgagaaaacttacaactaggatactttcagataccaccttatggctatgcagaattttcagatatgaaaatgggtgtgcttatttccacgaagaggaaagagaaggacttgcaaagatatgtaggcttgccattcattctcgatatgaagacttcgtagtggatggcttcaatgtgttatataacaagaagcctgtcatatatcttagtgctgctgctagacctggcctgggccaatacctttgtaatcagctcggcttgcccttcccctgcttgtgccgtgtaccctgtaacactgtgtttggatcccagcatcagatggatgttgccttcctggagaaactgattaaagatgatatagagcgaggaagactgcccctgttgcttgtcgcaaatgcaggaacggcagcagtaggacacacagacaagattgggagattgaaagaactctgtgagcagtatggcatatggcttcatgtggagggtgtgaatctggcaacattggctctgggttatgtctcctcatcagtgctggctgcagccaaatgtgatagcatgacgatgactcctggcccgtggctgggtttgccagctgttcctgcggtgacactgtataaacacgatgaccctgccttgactttagttgctggtcttacatcaaataagcccacagacaaactccgtgccctgcctctgtggttatctttacaatacttgggacttgatgggtttgtggagaggatcaagcatgcctgtcaactgagtcaacggttgcaggaaagtttgaagaaagtgaattacatcaaaatcttggtggaagatgagctcagctccccagtggtggtgttcagatttttccaggaattaccaggctcagatccggtgtttaaagccgtcccagtgcccaacatgacaccttcaggagtcggccgggagaggcactcgtgtgacgcgctgaatcgctggctgggagaacagctgaagcagctggtgcctgcaagcggcctcacagtcatggatctggaagctgagggcacgtgtttgcggttcagccctttgatgaccgcagcaggtaaaccaggcttggtggacatcccttgcttttgttctggggctgctgggtagattagcttgcccttatgatactccattctcctagagttattagcagctctttttggaggggcattttcttttcttttgggctaaatttaggtagattagcattcccatgtaacttaccagaatcagaatgagaattcagaagtcacctgaattggccgggcatggtggctcacacctgtaatcccagcaccttgggaggccaaggcaggcagatcatctgaggtcaggagttcgagaccagcctggccaacatagtgaaatcccgcccctactaaaaatacaaaaaattagccaggcaccctgtccacagcccccacacagactcgaggggcccccatctcctgttctgaacccaacagggtggtcccactgtgggaccacaaccaggtatgactgtgtgagaagcaggctcactaccaggctaccagggagcacaggggagcaggcgccaccttgaggcataaacccagagaaacaagacctccaagacggccaggcactggggcacacgccggtaacacagcaccgtgggagctgagacggaaggatcgcctgagcccaggattttgaaaccaccctgggcaacacagtgagaccccgtatctacaaaaaaatacacattagccaggcatggcggcatgcgcctggggtcccaagtactcgggaggtagaggagagaaaaatcacttgagcccagagaggtcaaggctacagggagctgagatcgcatcactgtactccagctggggtgaaacggcgagactctacctcaaaaataaataaatacatacataattaataaataaaacatcaaagaccagccgacctaactccatctaaaatacacaacttctacgcaaaatataaataaaattagaaaacaaactacaatctcagaaaagcactagca

SEQ ID NO: 715 - DNA, 924 bp, Homo sapiens
  misc_feature (1)...(924): n = a,t,c or g
tttcgtgtaagatataactcaactttgaaaatgtcagccgttatagttgaagaaatctgacccaagagacttcgctccgctgcaagatggaaggaagcttaagtaagacataaatttgtaatgaacttgctcacaacatccgccgccactgtgacttgcagtcatcatccattaccacaaaattagttgcaggatggctactcgtatccctccacacatgatcatcagtatttgcctcctgtgtcccaaccggcctgagtcaaggttacgactcactgattaaaaagagggactttttcaaatactttgcacttttgattgtgtattatggataccaaggaagagaagaaggaacggaaacaaagttattttgctcgactgaaaaagaaaaaacaagccaaacaaaatgcagagacagcctcagctgtagctacaaggactcatactgggaaggaagataataatacagtagttttagagccagacaagtgcaacattgctgtggaagaggaatatatgactgatgagaaaaaaaagagaaaaagtaatcagttaaaggagatcaggcgtacagaactaaagagatattatagtattgatgacaatcaaaacaaaacacatgataaaaaagagaagaagatggtggttcagaagccccatgggactatggaatacactgctggaaaccaggacaccctaaactccatagcactgaaatttaacatcactcccaataaattggtggaactgaataaacttttcacacatactattgttccaggccaggtcctttttgtgccagatgccaactctccttccagtaccttaaggctatcatcatccagtcctggtgctactgtctctccttcatcatnagatgcagaatatgntaattggctgatgctgacttagcacggaaggctt

SEQ ID NO: 716 - DNA, 679 bp, Homo sapiens
tttcgtgctgtggcgcgcggccggcagagggaggggagaggccactggggccgtgttagtctgccggtggggactcttgcagggccgtccccatgttgcgttttccgacctgtttcccatccttccgggtggtgggagagaagcagctcccgcaggagattattttcctggtctggtcgcccaagcgggatctcattgctttggccaacacagctggcgaggttttacttcatcgactggcaagttttcatcgagtttggagttttccaccaaatgaaaatacaggaaaggaggtgacgtgtctggcatggagaccagatggcaaacttttggcctttgctcttgctgataccaagaaaattgttttgtgtgatgtagaaaaacctgagagcttacactctttttctgtggaggctccagtttcctgtatgcattggatggaagtgacagtagaaagcagtgttctcacatcattttataatgctgaggatgaatcaaatcttctcttacctaaactacctacactgccaaaaaactatagcaacacctcaaaaatatttagtgaagaaaattctgatgaaattattaagctcttgggagacgtcaggcttaatattctcgtccttggaggaagctctggatttattgagctttatgcttatggaatgtttaaaattgc

SEQ ID NO: 717 - DNA, 821 bp, Homo sapiens
  misc_feature (1)...(821): n = a,t,c or g
ctttcatactgcctcctcccttgtttttctgtctcagagagatagtctgtcctaaatatcccatgtagcccaggccactgaattaaaacggagcgtattcgttctctgccccaccccgcaactcctgaaagcggcgcaactcaattacttgatccttatatgccccacgcgggactcatactacgtttcccgtgaacacgtgcagtccaaaccccgcccctgatatttatctcagtggacggtggccggaaaaggacaatggtttccatgtcagcggataaacgctctcccctcggctcccggacgcgacggaggtcgtagtagtagtgagtacgtgctgaggagcaaaggagtaaccaagagatccagtgaccgacagagcaagagccatgccgcgccggggcctggtggctgggccagacttggagtattttcagcgtcactatttcacgccggcggaggtggcccaacataacaggcccgaagacctctgggtatcttacctgggacgcgtgtacgacctaacgtcattggcacaggaatacaaggggaacctgctgctgaaacccatcgtggaagttgcaggccaggatatcagccactggtttgatccaaagaccagagacgtgagttatgctggaacctgggattgtgggtagaggaaatggagagcggggatgggaaggaaaggcggaggctagccagagcctaatggctgctctgacaccctcgccccaaaccctcctttaaagatccgcaagcacgaattccaccacatggnataagggtcgtcaatgnnnnnnnaaggggnatcaancccc

SEQ ID NO: 718 - DNA, 480 bp, Homo sapiens
ccggattccgggtcgacgatttcgtgcggcttttgtgttgggcagcgcgaatgtggcgagctcggtgcgtctccgctgctccttccccttatccctgggaggtccaagtggtcccgcggcagcttctgttgctctgggacctgcaggtcccggaaggtccttagggaggaccccagacaccggagactgggaaatggattcagtgtcatttgaagatgtggctgtggcctttactcaggaggagtgggctttgctggatccttctcaaaagaatctctacagagatgtgatgcaagaaatcttcaggaacctggcttctgtaggaaacaaatcagaagaccagaatatccaagatgacttcaaaaatcctgggagaaatctaagcagtcatgtggtagagagactgtttgaaattaaagaaggcagtcaatatggagaaaccttcagccaggattcaaatttgaatctgaataagatagt

SEQ ID NO: 719 - DNA, 467 bp, Homo sapiens
cgtaatctctcagcctttctgtgtctcctttcctccgcctcagtttggggcgggtcgggggaatggctgaggagatggagtcgtcgctcgaggcaagcttttcgtccagcggggcagtgtcaggggcctcagggtttttgcctcctgcccgctcccgcatcttcaagataatcgtgatcggcgactccaatgtgggcaagacatgcctgacctaccgcttctgcgctggccgcttccccgaccgcaccgaggccacgataggggtggatttccgagaacgagcggtggagattgatggggagcgcatcaagatccagctatgggacacagcaggacaagaacgattcagaaagagcatggttcagcactactacagaaatgtacatgctgttgtcttcgtgtatgatatgaccaacatggctagttttcatagcctaccatcttggatagaagaatgcaaacaacat

SEQ ID NO: 720 - DNA, 490 bp, Homo sapiens
tggcaccgatccgagattcccggatcgacgatttcgtcggagccccgaggggccggagctcctggcggtgccggatcctgacggcggccttcccccgggtcgattgtgatcatggctgctgagtctgatgttctgcatttccagtttgaacagcaaggagatgtggtcttgcagaaaatgaatcttttgagacagcagaatttattttgtgatgtatcaatttacattaatgacactgagttccaggggcacaaggtgattttggctgcttgctccacttttatgagagatcagtttttactcacacagtcaaaacatgtcagaatcaccatcttacagagtgcagaagttggcagaaaattgttactgtcttgctatactggagcacttgaagttaaaaggaaagagcttttgaaatacttgactgctgccagttaccttcagatggttcacattgcggaaaagcgcacagaagcttttgtcaagttct

SEQ ID NO: 721 - DNA, 706 bp, Homo sapiens
agaggaggttggtgtggagcacaggcagcaccgagcctgccccgtgagctgagggcctgcagtctgcggctggaatcaggatagacaccaaggcaggacccccagagatgctgaagcctctttggaaagcagcagtggcccccacatggccatgctccatgccgccccgccgcccgtgggacagacaggctggcacgttgcaggtcctgggagcgctggctgtgctgtggctgggctccgtggctcttatctgcctcctgtggcaagtgccccgtcctcccacctggggccaggtgcagcccaaggacgtgcccaggtcctgggagcatggctccagcccagcttgggagcccctggaagcagaggccaggcagcagagggactcctgccagcttgtccttgtggaaagcatcccccaggacctgccatctgcagccggcagcccctctgcccagcctctgggccaggcctggctgcagctgctggacactgcccaggagagcgtccacgtggcttcatactactggtccctcacagggcctgacatcggggtcaacgactcgtcttcccagctgggagaggctcttctgcagaagctgcagcagctgctgggcaggaacatttccctggctgtggccaccagcagcccgacactggccaggacatccaccgacctgcaggttctggctgcccgaggtgcccatgt

SEQ ID NO: 722 - DNA, 677 bp, Homo sapiens
tttcgtaacgccgcgtgctcttcccaaggggaggacgcgggagaagccggggcctgagtgctccaaggccccgtgggcttcttgggtttgttgcctccggccgctcattaactcaggatggcgtggaagacctcgcccgcctccccttctgggccgcggctccgcttaagtgaaggcctgtttgggcgtccccaccctggagaggggccggggtctggattttcagaactgccactcttctagtgcgctggcgtcaatgctcccttcctcgggccattggagactccgttgctttttaatggcggcagcggctgctgggtgagcagctggaggccggacagtgttcgtcccatccggagaggatcgctttctcctggcgtcaccagcgctgggttggtgggggtagcttttccctctttgctcctccattcttgaagaaagaagaagatgccactgccatttgggttgaaactgaaacgcacccggcgctacacggtgtccagcaagagttgcctggttgcccggatccaactgcttaataacgagtttgtggagttcaccctgtccgtggagagcactggccaggaaagcctcgaggccgtggcccagaggctggagctgcgggaggtcacttacttcagcctctggtactacaacaagcaaaatcagcgccggtg

SEQ ID NO: 723 - DNA, 600 bp, Homo sapiens
tttcgtgttgagcaccttcgtcgccattggctttcctcccccagctccagcctctctcatcttgggaatctgcgtcagaagtcactcgcagtcccgtcagcccagaagacgtaaagcaggctaccagcaattttgagaacttgcaaaaacagcttgcaaggaaaatgaagcttcctattttcatagcagatgcattcacagcaagagcatttcgtgggaatcctgctgctgtttgcctcctagaaaatgaattggatgaagacatgcatcagaaaattgcaagggagatgaacctctctgaaactgcttttatccgaaaactgcacccgacagacaactttgcacaaagttcctgctttggactgagatggtttacaccagcgagtgaggtcccactctgtggccatgccaccctggcttctgcagctgtgctgtttcacaaaataaaaaacatgaatagcacgctcacgtttgtcactctgagtggagaactaagggccagacgagcagaggacggcatcgtcctggacttgcctctttatccagcccacccccaggacttccatgaagtagaggacttgataaagactgccataggca

SEQ ID NO: 724 - DNA, 530 bp, Homo sapiens
tttcgttgcgcgttccggaactggtttcccggaaggagtatgtctgcgccttcgatccgaccggaagttgcacgctgagccgcggacaccatgcagtcggatgatgttatctgggatacactaggaaacaagcaattttgttccttcaaaataagaaccaagactcagagcttctgccgaaatgaatatagcctgactggactgtgtaatcggtcatcctgtcccctggcaaatagtcagtatgccactattaaagaagagaaaggacagtgctacttgtatatgaaggttatagaacgagcggcttttcctcggcgtctctgggaacgggtccggcttagtaaaaactatgagaaagcactggagcaaatagatgaaaatctgatttactggccccgtttcattcgacacaaatgtaagcagagattcaccaagatcacccaatacctaattcgaattagaaaacttacactaaagcgacagaggaaacttgttcctttgagtaagaaggtggagcgtagggagaaaag

SEQ ID NO: 725 - DNA, 428 bp, Homo sapiens
tttcgtagagcggggactcggcgaccctgccctcccgaccctcatgttcgaagagcctgagtgggccgaggcggccccagtagccgcgggccttgggcccgtaatctcacgacctccgcctgcggcctcctcgcaaaacaaggtgagtgactcgcgggagcaatgggagctgtttcaggccgcgaagcggacattggtggatcccagcgctgtgtgtattgcggggagggacacctgtggcaccgttaagggcgagtcctgatctgaagatccgagaacttccaaaagaaactgacgttgggtcagagagagttgttgagtaaaagttggtgaagcgaagagggttcttcagacaggaaaaagtacgtacaagggccctgggacaagagagcatgttctgtcagagtcacaaacacaagtggtccttt

SEQ ID NO: 726 - DNA, 859 bp, Homo sapiens; identical to SEQ ID NO: 601
  misc_feature (1)...(859): n = a,t,c or g

SEQ ID NO: 727 - DNA, 450 bp, Homo sapiens
tttcgtcagtgtggggcctggaccgctgggtaggcgcgtccagcggcctgagcaggggagggtaatgaggctgttacgcgccttctccgcatcttggcgggagcctgacgccccgcttcttccctaacggggtgttccaccggcgcctgccgaggcctaggcctccgcagccgccctccgtctcctcagccccgacgctgcgcccgctttgtgctcatttttctctggggaaactgaggctccgagtgcgaaagtcagccgaggtcgccccgcccaggacagagaagggctgggggtcggctgagccgcggcattcccgggccccgctagggctgcagggtctcaggatggcagcctcggcgcaggtgtctgtgacctttgaggatgtggctgtgacattcacccaggaggagtggggacagttggatgcagcccagagaaccttgtatc

SEQ ID NO: 728 - DNA, 439 bp, Homo sapiens
tttcgtgggtcgctttcctcaccttcctcgctgcgcgggcggcggttggtaaccggtcagaccagcccgagagggacctggtgcctgtacccaggcttctgtcgctctgtcgcctgcgctatgccctgctgtagtcacaggagctgtagagaggaccccggtacatctgaaagccgggaaatggacccagtggtctttgaggatgtggctgtgaacttcacccaggaagagtggacattgctggatatttcccagaagaatctcttcagggaagtgatgctggaaactttcaggaacctgacctctataggaaaaaaatggagtgaccagaacattgaatatgagtaccaaaaccccagaagaagcttcaggagtctcatagaagagaaagtcaatgaaattaaagaagacagtcattgtggagaaacttttacccagg

SEQ ID NO: 729 - DNA, 236 bp, Homo sapiens
cggccgcgtcgaccgacgttagtgagggacccaatgtgagtccccggccagctgaatccaagccgtgtgtactgcgtggtcagcactgcccgacagtcctagctaaacttcgccaactccgctgcctttgccgtcaccatgccacagaatgaatatattgaattacaccgtaaacgctatggattccgtttggattaccatgagaaaaagagaaagaagcaaagtcgagaggctca

SEQ ID NO: 730 - DNA, 807 bp, Homo sapiens
tgggaacacaagttgacgctttttgtgttccttgagtccagtcgggaagggcccttgtgactgggtctcatgccaaacaacttgttacaataagagctagggtcccagaccatgcggaaacttcatgagaatcctctgtagtctggtgagtgtagtgtccgactctggagcccaggctgttgcttcccggtctggtggtgaatcctccatagtctggagatctcagccctgctgagctgatgatgctgactataggagatgttattaaacaactgattgaagcccacgagcaggggaaagacatcgatctaaataaggtgaaaaccaagacagctgccaaatatggcctttctgcccagccccgcctggtggatatcattgctgccgtccctcctcagtatcgcaaggtcttgatgcccaagttaaaggcgaaacccatcagaactgctagtgggattgctgtcgtggctgtgatgtgcaaaccccacagatgtccacacatcagttttacaggaaatatatgtgtatactgccctggtggacctgattctgattttgagtattccacccagtcttacactggctatgagccaacctccatgagagctatccgtgccagatatgaccctttcctacagacaagacaccgaatagaacagttaaaacaacttggtcatagtgtggataaagtggagtttattgagatgggtggaacgtttatggcccttccagaagaatacagagattattttattcgaaatttacatgatgccttatcaggacatacttccaacaatatttacgagg

SEQ ID NO: 731 - DNA, 944 bp, Homo sapiens
tttcgtgtgaggggaggggcgcgtgctaaaccagaagaggtaaaccaatgcagtgagagagaggtggttgtgggctccacagcttctgatttggaggaagctgcgagaccgagagcctaggagcaccttccacgcccagggctgtggtacaggttggtgggggaggggcgccacgcggtgtttggcaggaaggggaggcctctctactgaccggaagctgcgctagaaaaagaaggaggagactgcggcgcagcagcgactagtgggagtccgatgtgggagaggggctgcggccaccgccaccgccgccgccaccaggaaggcggaggacgcaggagccaagagcaagggacgccgccacggtcatcttcgcctgccccgccgccctcttagagacactcattgcctatggatcatcctctcccagcttttgcaagcaccgggctgctcgcccgctgattttcctcctccataggctcactgcggaggcaacggcgaggtgtccgatttgtgcacttgaggcccgcaatccgggacggtggggaatctgcgcctcctggccgggcatgaagaccccgtttggaaaggcagctgcagggcagcggtccaggacgggcgctggccacggcagtgtgtctgttaccatgataaagaggaaggctgcacacaagaagcataggagccgacccacctcccagcctcgggggaacatcgtgggctgcataattcagcacggatggaaagatggagatgaacctctaacacagtggaaaggaaccgttctggatcagctcctttgaataaacctgcccaccaccaagaacccatacatgactttcttttcattgtatcaaacgaatgtgtccaccggtgtgagcaccagcaactcacttcttcctcagacatctctaaagctggacagaatatgagggacaatatcgttt

SEQ ID NO: 732 - DNA, 761 bp, Homo sapiens
ccgagacctcggtgtggcccttgaggcatttcaatgggcgagggccggcgactgtggatctggagctggacgcgctggaggggaaggagttgatgcaggacggcgcgtccctgagcgacagcaccgaggacgaggaggagggggcgagcctgggcgacggcagcggggcggaaggcggcagctgcagcagcagcaggcggtcgggcggcgatggcggggacgaagtggagggcagcggtgtgggagctggcgaaggagagactgtccagcacttcccgctcgcgcggcccaagtctctaatgcagaagctccaatgctccttccagacctcctggctcaaggactttccctggctgcgctattccaaggatactggtcttatgtcttgcggctggtgccaaaagacccctgcagatgggggaagcgtggaccttcccccagtggggcatgatgagctttcgcgagggacccgcaactacaagaaaaccctcctcctgaggcaccacgtctctaccgagcacaaactccacgaagccaacgcccaggagtcagaaataccatcagaggaggggtactgtgactttaatagtaggccaaatgagaactcttattgctatcaacttctgcgacaactaaatgaacagagaaagaaaggtattctttgtgatgtcagcattgtggtaagcggaaaaatcttcaaagctcataagaacatcctggttgcaggcagccgtttctttaagactttatattgcttttca

SEQ ID NO: 733 - DNA, 523 bp, Homo sapiens
  misc_feature (1)...(523): n = a,t,c or g
aattcccgggtcgacgatttcgtgcgggagcagagatctgcgggcgnttgcagcttgcggtagggaggcgtggtggtctgaagcctccgagcagccgcggccatggcggatgtaaccgcccgtagtctgcaatacgagtacaaggcgaactcgaatcttgtgctccaagctgaccgttctctcattgaccggacccgccgggatgaacccacaggagaggtgctgtcccttgttgggaagctggagggcacccgtatgggagacaaggctcaacggaccaaaccgcagatgcaggaggaaagaagagccaagcgaagaaagcgtgatgaggaccggcatgacatcaacaagatgaagggttatactctgctgtcggagggcattgatgagatggtgggcatcatctacaagcccaaaactaaagagactcgggagacctatgaggtgctactcagcttcatccaggctgctcttggggaccagccacgtgatatcctttgtggggcagctgatgaagttctag

SEQ ID NO: 734 - DNA, 1341 bp, Homo sapiens
ttttttttttttaaccagattatttcacttattatttattttatcttccaatttcctcttgccagactcccatccaaagagtcataagcagccttcttcccaccttcttacatgaaatacatccccacctgaacaaaggcacacggacaggaggaaggggaataggacttcgcaaaactggacacggcatcgcttcagatcttggactctgaggttccgttgttactggtttcacagttacaggcttcggatggtctgcacgtgctgtttcaagactaatggtagtctctattgcttctgttatgtccttatccaacctgttcagcctgtcctctgactcaaatatggagtaatcaatggtgaaatctgcactaaagtcatcataactgggggtgactgtataataatagaccacctgataatattcatcctctcccagtctttcttcatcctcatattcttgtcccaggataagtggcacagcaaagatggctacaaagaggacatccattctggattctgcactattgcatcaccacccagagttgcctttctctctgaggcttcatcagtctcttttcgtcacagtggaaatgttctgaggaaggggtgagcatttttctagactgaaaagaatccctttcttctgtctgtctggagcagccatgggggctgcggtgtttttcggctgcactttcgtcgcgttcggcccggccttcgcgcttttcttgatcactgtggctggggacccgcttcgcgttatcatcctggtcgcagggtgagtagagggcccgggagacgcgggagagcgtcgaagagagaggtgcggaaggggctggaggaactggggcaagcctgggagcctgaattggggacgataagtcggaggtgaagtttgggcggaggtgaggggttgggtctgggagatttgtcctttcccgcagttggtttccaccttccaaggatctcacagattcctcctatattcctcccagcgacgtcagagaaggcccaaggccgagactcgtgagggggctgtgctgacctaggcaggccgagtcaggtgccttaggggaggatccaggaacggatacctcgcccttccgtgctcgcacactctggctgtcatcgctctgaagactctttaattagatttctcccctttccagtgcgttcacttttctacagatgagtctcctggtggagacagttaccctacctggtccatgtctccctaaccatccggaaggctaacttccacttttcaagcagctttggctggtttccctccttgatttctctggctcccactactattgcttgtctcactgcccctgtatt

SEQ ID NO: 735 - DNA, 703 bp, Homo sapiens
tttcgtgagaggcccaggtgaggagcaagcgcccgcgttccggaagcccgctcccggggccatgggggcacaggtgaggctgccgcccggagagccctgccgagaaggatatgtgctgtctctggtctgtccaaactcctcccaggcttggtgtgagatcacaaatgtgtcacagctgctggcttctcctgtgctctacacggacctgaattacagcataaacaacttgagcatttcagcaaatgtagaaaacaaatacagtctttatgtgggcttggtactggcagtaagctcaagtatttttattggctccagcttcatactgaaaaagaagggcctcttgcaactggccagcaagggctttactagagctggacaaggtggacattcttacctgaaggaatggctctggtgggtaggattgctgtcaatactgtcctggaatgcaagggaaaaagttgacctttgaaatattacattttaaccacagacttcttgtattttcttcaccataacaatagagaaaagtacttttctttcatattttcccacctcctaatttgaacaactattgtagctgcatattttctcaagaaagagtacagtttccttgccaggacaacacggataagtgaaaggcttctgtggctgcttggtactgaacaaatggagaagaaatgaagggtgtcagcactctccttcc

SEQ ID NO: 736 - DNA, 401 bp, Homo sapiens
tttcgtctggcgtggacgtttgtggtggggcgtgttggtccgcgctctcagaactgtgctgggaaggatggtagggcgactggggctcacctccgcaccgttgtaggacccggggtagggttttgagcccgtgggagctgccccacgcggcctcgtcctgccaacggtcggatggcggagacgaaggacgcagcgcagatgttggtgaccttcaaggatgtggctgtgacctttacccgggaggagtggagacagctggacctggcccagaggaccctgtaccgagaggtgatgctggagacctgtgggcttctggtttcactagggcatcgggttcccaaaccagagttggtccacctgctaaagcatgggcaggagctgtggatagtgaagagaggcct

SEQ ID NO: 737 - DNA, 933 bp, Homo sapiens
agcggccgctcgcccgtgttgtgtgtccccggtgtcaccgagcgtgttgtgtgtccgtgcggcgcggcgctcgtgtggctccctcgcgcccaccacgctggcccccgggccccggctcgcccttcccaggcgccggctgcagcagagtttcagaacaagcttcctggaacccatgacccatgaagtcttgtcgacatttataccgtctgagggtagcagctcgaaagtagaagaaagtgttgccagggacggcagtatctctttgtgtgaccctggcggcttatgggacgttggcttcagacctttgtgatacaccatgctgcgtgggacgatgacggcgtggagaggaatgaggcctgaggtcacactggcttgcctcctcctagccacagcaggctgctttgctgacttgaacgaggtccctcaggtcaccgtccagcctgcgtccaccgtccagaagcccggaggcactgtgatcttgggctgcgtggtggaacctccaaggatgaatgtaacctggcgcctgaatggaaaggagctgaatggctcggatgatgctctgggtgtcctcatcacccacgggaccctcgtcatcactgcccttaacaaccacactgtgggacggtaccagtgtgtggcccggatgcctgcgggggctgtggccagcgtgccagccactgtgacactagccagtgagtctgctcctttgcctccctgccatggtgcggtccctcctcatctctcccaccctgaagcccccaccattcatgctgcctcttgttactcttagcataaaatgggccttaactgcagaaatgtcaaatcagaacagtagctgccttagtaatgcccagtgatgggggaccccttgtgcccttggaaaacctcactccaagtagaggctgtatctggagtgagtgtctacagagaggg

SEQ ID NO: 738 - DNA, 420 bp, Homo sapiens
ctggggtcggcggagacagctggtgtctgaagccgctcgcgcccagggtgaccctgtttgcagcacgatgtctgaagaagaggcggctcagatccccagatccagtgtgtgggagcaggaccagcagaacgtggtgcagcgtgtggtggctctgcccctggtcagggccacgtgcaccgcggtctgcgatgtttacagtgcagccaaggacaggcacccgctgctgggctccgcctgccgcctggctgagaactgcgtgtgcggcctgaccacccgtgccctggaccacgcccagccgctgctcgagcacctgcagccccagctggccactatgaacagcctcgcctgcaggggcctggacaagctggaagagaagcttccctttctccagcaaccttcggagacggtggtgacctcagc

SEQ ID NO: 739 - DNA, 1248 bp, Homo sapiens
tttcgtagcgagtaaagaagcagatttgctctccctcccgcttcctccctcccatcttcccacccgggctgtgcccaggccacagagcagctgcaggccttgggagaggacccacacagcctcctgtaggtggcaacagtgccacctgtttgactcatagggctgaaccgaggactgaaaaagggaggaggcagaccactcggagaggagctgggaagcagtgcagagaggagagcggagcggagctgccgctgagcaaaggccttcaccatggccgagtcccccggctgctgctccgtctgggcccgctgcctccactgcctgtatagctgccactggaggaaatgccccagagagaggatgcaaaccagcaagtgcgactgtatctggtttggcctgctcttcctcaccttcctcctttccctgagctggctgtacatcgggctcgtccttctcaatgacctgcacaacttcaatgaattcctcttccgccgctggggacactggatggactggtccctggcattcctgctggtcatctctctactgggcacatatgcatccttgctattggtcctggccctgctcctgcggctttgtagacagcccctgcatctgcacagcctccacaaggtgctgctgctcctcattatgctgcttgtggcggctggccttgtgggactggacatccaatggcagcaggagaggcatagcttgcgtgtgtcactgcagactgcaggtagctctgaactccagcagtcaggccctaagaggaaagcggggaggggcactggagaagagcccacctcaccagctcttgtccacaggccacagccccattccttcatattggagcagccgctggaattgccctcctggcctggcctgtggctgataccttctaccgtatccaccgaagagagcccaagattctgctactgctcctattttttggagttgtcctggtcatctacttggcccccctatgcatctcctcaccctgcatcatggaacccagagacttaccacccaagcctgggctggtgggacaccgaggggcccccatgctggctcccgagaacaccctgatgtccttgcggaagacagctgaatgcggagctactgtgtttgagactgatgtgatggtcagctccgatggggtccccttcctcatgcatgatgagcacctcagcaggaccacgaatgtagcctctgtattcccaacccgaatcacagcccacagcagtg

SEQ ID NO: 740 - protein, 185 aa, Homo sapiens
FVGRLLRLGEALRLRPDPSGGCRLQPALVGETEMSEKENNFPPLPKFIPVKPCFYQNFSDEIPVEHQVLVKRIYRLWMFYCATLGVNLIACLAWWIGGGSGTNFGLAFVWLLLFTPCGYVCWFRPVYKAFRADSSFNFMAFFFIFRSPVCPDRHPGDWLLRLGRVRLAVGNWILPVQPGRCRGHA

SEQ ID NO: 741 - protein, 177 aa, Homo sapiens
FLGAGADIFCAYLRMSSKQATSPFACAADGEDAMTQDLTSREKEEGSDQHVASHLPLHPIMHNKPHSEELPTLVSTIQQDADWDSVLSSQQRMESENNKLCSLYSFRNTSTSPHKPDEGSRDREIMTSVTFGTPERRKGSLADVVDTLKQKKLEEMTRTEQEDSSCMEKLLSKDWKE

SEQ ID NO: 742 - protein, 434 aa, Homo sapiens
EGYLTGRPTRPVAVRGKSTADLRMMGRSPGFAMQHIVGVPHVLVRRGLLGRDLFMTRTLCSPGPSQPGEKRPEEVALGLHHRLPALGRALGHSIQQRATSTAKTWWDRYEEFVGLNEVREAQGKVTEAEKVFMVARGLVREAREDLEVHQAKLKEVRDRLDRVSREDSQYLELATLEHRMLQEEKRLRTAYLRAEDSEREKFSLFSAAVRESHEKERTRAERTKNWSLIGSVLGALIGVAGSTYVNRVRLQELKALLLEAQKGPVSLQEAIREQASSYSRQQRDLHNLMVDLRGLVHAAGPGQDSGSQAGSPPTRDRDVDVLSAALKEQLSHSRQVHSCLEGLREQLDGLEKTCSQMAGVVQLVKSAAHPGLVEPADGAMPSFLLEQGSMILALSDTEQRLEAQVNRNTIYSTLVTCVTFVATLPVLYMLFKAS

SEQ ID NO: 743 - protein, 211 aa, Homo sapiens
NLPPLTPQPGPRLAGSGPSHWFSPLSLPVASKAPGTMAQALGEDLVQPPELQDDSSSLGSDSELSGPGPYRQADRYGFIGGSSAEPGPGHPPADLIRQREMKWVEMTSHWEKTMSRRYKKVKMQCRKGIPSALRARCWPLLCGAHVCQKNSPGTYQELAEAPGDPQWMETIGRDLHRQFPLHEMFVSPQGHGQQGLLQVLKAYTLYRPEQG

SEQ ID NO: 744 - protein, 55 aa, Homo sapiens
LRGMAAAAAGPAASQRFFQSFSDALIDQDPQAALEVGEPFLLPPLPADPPPSSTA

SEQ ID NO: 745 - protein, 182 aa, Homo sapiens
WACFRSAHCSRHLRNRIFMYLYWDKTRSPVCKGPALREERPQPRLKLEDYKDRLKSGEHLNPDQLEAVEKYEEVLHNLEFAKELQKTFSGLSLDLLKAQKKAQRREHMLKLEAEKKKLRTILQVQYVLQNLTQEHVQKDFKGGLNGAVYLPSKELDYLIKFSKLTCPERNESLRQTLEGSTV

SEQ ID NO: 746 - protein, 135 aa, Homo sapiens
  misc_feature (1)...(135): Xaa = any amino acid or other as shown in Table 3
XAGVQMKLEFLQRKFWAATRQCSTVDGPCTQSCEDSDLDCFVIDNNGFILISKRSRETGRFLGEVDGAVLTQLLSMGVFSQVTMYDYQAMCKPSSHHHSAAQPLVSPISAFLTATRWLLQELVLFLLEWSVWGSX

SEQ ID NO: 747 - protein, 156 aa, Homo sapiens
CRGRLAQLEEAAVAATMSAGDAVCTGWLVKSPPERKLQRYAWRKRWFVLRRGRMSGNPDVLEYYRNKHSSKPIRVIDLSECAVWKHVGPSFVRKEFQNNFVFIVKTTSRTFYLVAKTEQEMQVWVHSISQVCNLGHLEDGAADSMESLSYTRSYLQ

SEQ ID NO: 748 - protein, 55 aa, Homo sapiens
IPAVPLTSCVTVGSYSLSVRDYDPRQGDTVKHYKIRTLDKRGFYISPRSTFSTLQ

SEQ ID NO: 749 - protein, 381 aa, Homo sapiens
KDSVLNIARGKKYGEKTKRVSSRKKPALKCTSQKQPALKAICDKEDSVPNTATEKKDEQISGTVSSQKQPALKATSDKKDSVSNIPTEIKDGQQSGTVSSQKQPAWKATSVKKDSVSNIATEIKDGQIRGTVSSQRQPALKATGDEKDSVSNIAREIKDGEKSGTVSPQKQSAQKVIFKKKVSLLNIATRITGGWKSGTEYPENLPTLKATIENKNSVLNTATKMKDVQTSTPEQDLEMASEGEQKRLEEYENNQPQVKNQIHSRDDLDDIIQSSQTVSEDGDSLCCNCKNVILLIDQHEMKCKDCVHLLKIKKTFCLCKRLTELKDNHCEQLRVKIRKLKNKASVLQKRLSEKEEIKSQLKHETLELEKELCSLRFAIQQ

SEQ ID NO: 750 - protein, 296 aa, Homo sapiens
SPLRYRAGQSGSTISSSSCAMWRCGGRQGLCVLRRLSGGHAHHRAWRWNSNRACERALQYKLGDKIHGFTVNQVTSVPELFLTAVKLTHDDTGARYLHLAREDTNNLFSVQFRTTPMDSTGVPHILEHTVLCGSQKYPCRDPFFKMLNRSLSTFMNAFTASDYTLYPFSTQNPKDFQNLLSVYLDATFFPCLRELDFWQEGWRLEHENPSDPQTPLVFKGVVFNEMKGAFTDNERIFSQHLQNRLLPDHTYSVVSGGDPLCIPELTWEQLKQFHATHYHPSNARFFTYGNFPLDQH

SEQ ID NO: 751 - protein, 163 aa, Homo sapiens
RGAKAKSAVLPPGPPCSSILILSPPAPLTPRSPGTEATRPTAMSKSLKKKSHWTSKVHESVIGRNPEGQLGFELKGGAENGQFPYLGEVKPGKVAYESGSKLVSEELLLEVNETPVAGLTIRDVLAVIKHCKDPLRLKCVKQGESSGLLSVLPGGGTARGAGQ

SEQ ID NO: 752 - protein, 99 aa, Homo sapiens
SHRPQPDAWRQGNAFQCVQKEKMQVSSAEVRIGPMRLTQDPIQVLLIFAKEDSQSDGFWWACDRAGYRCNIARTPESALECFLDKHHEIIVIDHRQTQN

SEQ ID NO: 753 - protein, 193 aa, Homo sapiens
FRLAGCGHLLVSLLGLLLLLARSGTRALVCLPCDESKCEEPRNCPGSIVQGVCGCCYTCASQRNESCGGTFGIYGTCDRGLRCVIRPPLNGDSLTEYEAGVCEDENWTDDQLLGFKPCNENLIAGCNIINGKCECNTIRTCSNPFEFPSQDMCLSALKRIEEEKPDCSKARCEVQFSPRCPEDSVLIEGYAPP

SEQ ID NO: 754 - protein, 73 aa, Homo sapiens
FRMAANVGSMFQYWKRFDLQQLQRELDATATVLANRQDESEQSRKRLIEQSREFKKNTPEVRRVTIVFALKGS

SEQ ID NO: 755 - protein, 83 aa, Homo sapiens
ETLSCRIMDHPSREKDERQRTTKPMAQRSAHCSRPSGSSSSSGVLMVGPNFRVGKKIGCGNFGELRLGEGLPQVYYFGPCGKY

SEQ ID NO: 756 - protein, 100 aa, Homo sapiens
  misc_feature (1)...(100): Xaa = any amino acid or other as shown in Table 3
GCCKDXHSGVIGRSWAMLFASGGFQVKLYDIEQQQIRNALENIRWASRRSPEGMEVGLFLSVGLVCHILKAMRICDVTFSSDGYCSASELVKARPTVAGM

SEQ ID NO: 757 - protein, 130 aa, Homo sapiens
NSRVDDFVSARPKPRPLPRARGMVVVTGREPDSRRQDGAMSSSDAEDDFLEPATPTATQAGHALPPAATGSFLRLFPLTSEGLTSLHACPHCGATKTPCWQPCSVGGTTSPRTPRAGTSSTEMAHTLEMC

SEQ ID NO: 758 - protein, 121 aa, Homo sapiens
RALWVGGCSGEACGIGMSGLLTDPEQRAQEPRYPGFVLGLDVGSSVIRCHVYDRAARVCGSSVQKVENLYPQIGWVEIDPDVLWIQFVAVIKEAVKAAGIQMNQIVGLGISTQRATFITWN

SEQ ID NO: 759 - protein, 210 aa, Homo sapiens
GLAAEQSMQFVKLWCGCSGEFPTRLRRRTPLTEAMEGGPAVCCQDPRAELVERVAAIDVTHLEEADGGPEPTRNGVDPPPRARAASVIPGSTSRLLPARPSLSARKLSLQERPAGSYLEAQAGPYATGPASHISPRAWRRPTIESHHVAISDAEDCVQLNQYKLQSEIGKGAYGVVRLAYNESEDRHYAMKVLSKKKLLKQYGFPRRPPP

SEQ ID NO: 760 - protein, 172 aa, Homo sapiens
FVYGKPVTLWPTISSVVPSTFLGLGNYEVEVEAEPDVRGPEIVTMGENDPPAVEAPFSFRSLFGLDDLKISPVAPDADAVAAQILSLLPLKFFPIIVIGIIALILALAIGLGIHFDCSGKYRCRSSFKCIELIARCDGVSDCKDGEDEYRCVRVGGQNAALQVFTAASRKTM

SEQ ID NO: 761 - protein, 104 aa, Homo sapiens
SLAMPFGCVTLGDKKNYNQPSEVTDRYDLGQVIKTEEFCEIFRAKDKTTGKLHTCKKFQKRDGRKVRKAAKNEIGILKMVKHPNILQLVDVFVTRKEYFIFLEL

SEQ ID NO: 762 - protein, 249 aa, Homo sapiens
QRRRFRAGLWGGHGLTDGLRRNGGCGCSARVPRVGERLRGHRCPDPLCLLLDMLFLSFHAGSWESWCCCCLIPADRPWDRGQHWQLEMADTRSVHETRFEAAVKVIQSLPKNGSFQPTNEMMLKFYSFYKQATEGPCKLSRPGFWDPIGRYKWDAWSSLGDMTKEEAMIAYVEEMKKIIETMPMTEKVEELLRVIGPFYEIVEDKKSGRSSDITSDLGNVLTSTPNAKTVNGKAESSDSGAESEEEEAC

SEQ ID NO: 763 - protein, 184 aa, Homo sapiens
SCFKGRTGGRSGSSGDSSRWARCGRHFSASTEEPPLSQPCSALPRSGRRGCAVPSSVTKMLSFFRRTLGRRSMRKHAEKERLREAQRAATHIPAAGDSKSIITCRVSLLDGTDVSVDLPKKAKGQELFDQIMYHLDLIESDYFGLRFMDSAQVAHWLDGTKSIKKQVKIGSPYCLHLRVKFYSS

SEQ ID NO: 764 - protein, 138 aa, Homo sapiens
ESRERSGNRRGAEDRGTCGLQSPSAMLGAKPHWLPGPLHSPGLPLVLVLLALGAGWAQEGSEPVLLEGECLVVCEPGRAAAGGPGGAALGEAPPGRVAFAAVRSHHHEPAGETGNGTSGAIYFDQVLVNEGGGFDRAS

SEQ ID NO: 765 - protein, 168 aa, Homo sapiens
EDVKSYYTVHLPQLENINSGETRTISHFHYTTWPDFGVPQSPASFLNFLFKVRESGSLNPDHGPVVIHRSAGTGRSSTFSVVHTCLVLMEKGDDINIKQVLLNIRKFQMGLIQTPDQLRFSYMAITEGAKCVKGDSSIQKRWKELSKEDLPPAFDHSPNKIMTEKYNR

SEQ ID NO: 766 - protein, 255 aa, Homo sapiens
LNRQRCGDQVLVPGTGLAAILRTLPMFHDEEHARARGLSEDTLVLPPASRNQRILYTVLECQPLFDSSDMTIAEWVCLAQTIKRHYEQYHGFVVIHGTDTMAFAASMLSFMLENLQKTVILTGAQVPIHALWSDGRENLLGALLMAGQYVIPEVCLFFQNQLFRGNRATKVDARRFAAFCSPNLLPLATVGADITINRELVRKVDGKAGLVVHSSMEQDVGLLRLYPGIPAALVRAFLQPPLKGVVMETFGSGNG

SEQ ID NO: 767 - protein, 260 aa, Homo sapiens
LFRLAPGFLRSLARQGYHQIWAFPFLPSGATATWPAASRSRSLAARSLPRSPARPGPNDALLGEHDFRGQGVRAQRFRFSEEPGPGADGAVLEVHVPQIGAGVSLPGILAAKCGAEVILSDSSELPHCLEVCRQSCQMNNLPHLQVVGLTWGHISWDLLALPPQDIILASDVFFEPEDFEDILATIYFLMHKNPKVQLWSTYQVRSADWSLEALLYKWDMKCVHIPLESFDADKEDIAESTLPGRHTVEMLVISFAKDSL

SEQ ID NO: 768 - protein, 200 aa, Homo sapiens
  misc_feature (1)...(200): Xaa = any amino acid or other as shown in Table 3
SFIYKHTHRARFGPRAIVASPALTAGPHVSLTASCRVGMWVSCSPSPFLHPTNTLVAVLERDTLGIREVRLFNAVVRWSEAECQRQQLQVTPENRRKVLGKALGLIRFPLMTIEEFAAGNRARAQGLVWEGSGTQVGIWCTEDSAPEFTAESLADAWHIQIGRNLACEDASTWAICXPRPGSVPTVHTARPRLSCLSSCF

SEQ ID NO: 769 - protein, 33 aa, Homo sapiens
  misc_feature (1)...(33): Xaa = any amino acid or other as shown in Table 3
MASTQDAELAVSRXRAIALXPGXQSXXPSQKKK

SEQ ID NO: 770 - protein, 599 aa, Homo sapiens
LLKSCGVLLSGVCIPCEGKGPTVLVIQTAVPQDRPTKSSMRSAAKPWNPAIRAGGHGPDRVRPLPAASSGMKSSKSSTSLAFESRLSRLKRASSEDTLNKPGSTAASGVVRLKKTATAGAISELTESRLRSGTGAFTTTKRTGIPAPREFSVTVSRERSVPRGPSNPRKSVSSPTSSNTPTPTKHLRTPSTKPKQENEGGEKVRLSPKFRELLAEAKAKDSEINRLRSELKKYKEKRTLNAEGTDALGPNVDGTSVSPGDTEPMIRALEEKNKNFQKELSDLEEENRVLKEKLIYLEHSPNSEGAASHTGDSSCPTSITQESSFGSPTGNQLSSDIDEYKKNIHGNALRTSGSSSSDVTKASLSPDASDFEHITAETPSRPLSSTSNPFKSSKCSTAGSSPNSVSELSLASLTEKIQKMEENHHSTAEELQATLQELSDQQQMVQELTAENEKLVDEKTILETSFHQHRERAEQLSQENEKLMNLLQERVKNEEPTTQEGKIIELEQKCTGILEQGRFEREKLLNIQQQLTCSLRKVEEENQGALEMIKRLKEENEKLNEFLELERHNNNMMAKTLEECRVTLEGLKMENGSLKSHLQG

SEQ ID NO: 771 - protein, 103 aa, Homo sapiens
SQMHRLIFVYTLICANFCSCRDTSATPQSASIKALRNANLRRDESNHLTDLYRRDETIQVKGNGYVQSPRFPNSYPRNLLLTWRLHSQENTRIQLVFDNQFGL

SEQ ID NO: 772 - protein, 218 aa, Homo sapiens
PFKKMTDLLRSVVTVIDVFYKYTKQDGECGTLSKGELKELLEKELHPVLKNPDDPDTVDVIMHMLDRDHDRRLDFTEFLLMIFKLTMACNKVLSKEYCKASGSKKHRRGHRHQEEESETEEDEEDTPGHKSGYRHSSWSEGEEHGYSSGHSRGTVKCRHGSNSRRLGRQGNLSSSGNQEGSQKRYHRSSCGHSWSGGKDRHGSSSVELRERINKSHIK

SEQ ID NO: 773 - protein, 130 aa, Homo sapiens
VPKISGPDHIDFIPWDQLFMASSSSVTEFLVLGFSSLGELQLVLFAVFLCLYLIILSGNIIIISVIHLDHSLHTPMYFFLGILSISEIFYTTVILPKMLINLFSVFRTLSFVSCATQMFYEIVGPGTQER

SEQ ID NO: 774 - protein, 204 aa, Homo sapiens
  misc_feature (1)...(204): Xaa = any amino acid or other as shown in Table 3
DHSTETPGIPAAEPVSHGTGKLERAPTLPAGAELPAPAAVPCPTLXVCLYPQLLGLSVATMVTLTYFGAHFAVIRRASLEKNPYQAVHQWGTQQRLIQHPESGSEGQSLLGPLRAFSAGLSLVGLLTLGAVLSAAATVREAQGLMAGGFLCFSLAFCAQVQVVFWRLHSPTQVEDAMLDTYDLVYEQAMKGTSHVRRQELAAIQ

SEQ ID NO: 775 - protein, 121 aa, Homo sapiens
QPGYSEYDKNRGQGMLLNMMCGRQLSAISLCLAVTFAPLFNAQADEPEVIPGDSPVAVSEQGEALPQAQATAIMAGIQPLPEGAAEKARTQIESQLPAGYKPVYLNQLQLLYAARGISCSV

SEQ ID NO: 776 - protein, 142 aa, Homo sapiens
RTRAADVYVFSLTGKSRNVSSSTVRRSAVGGMSALALFDLLKPNYALATQVEFTDPEIVAEYITYPSPNGHGEVRGYLVKPAKMSGKTPAVVVVHENRGLNPYIEDVARRVAKAGYIALAPDGLSSVGGYPGNDIKVVSAAA

SEQ ID NO: 777 - protein, 150 aa, Homo sapiens
VKQRHGNSLLTTETKCISCRLGVPLSPQRRFQAIRIEEVKLRWFAFLIVLLAGCSSKHDYTNPPWNAKVPVQRAMQWMPISQKAGAAWGVDPQLITAIIAIESGGNPNAVSKSNAIGLMQLKASTSGRDVYRRMGWSGEPTTSELKNSSR

SEQ ID NO: 778 - protein, 296 aa, Homo sapiens
HAAGIRHEAKPKRSFYAARDLYKYRHQYPNFKDIRYQNDLSNLRFYKNKIPFKPDGVYIEEVLSKWKGDYEKLEHNHTYIQWLFPLREQGLNFYAKELTTYEIEEFKKTKEAIRRFLLAYKMMLEFFGIKLTDKTGNVARAVNWQERFQHLNESQHNYLRITRILKSLGELGYESFKSPLVKFILHEALVENTIPNIKQSALEYFVYTIRDRRERRKLLRFAQKHYTPSENFIWGPPRKEQSEGSKAQKMSSPLASSHNSQTSMHKKAKDSKNSSSAVHLNSKTAEDKKVAPKEPV

SEQ ID NO: 779 - protein, 90 aa, Homo sapiens
ELQVFQPIGGMSDSGSQLGSMGSLTMKSQLQITVISAKLKENKKNWFGPSPYVEVTVDGQSKKTEKCNNTNSPKWKQPLTVIVTPVSKLH

SEQ ID NO: 780 - protein, 88 aa, Homo sapiens
IETLSFVIRNWNTHAMSKPIVMERGVKYRDADKMALIPVKNVATEREALLRKPEWMKIKLPADSTRIQGIKAAMRKNGLHSVCEEASC

SEQ ID NO: 781 - protein, 35 aa, Homo sapiens
PRMVLGKPQTDPTLEWFLSHCHIHKYPSKSTLIPQ

SEQ ID NO: 782 - protein, 145 aa, Homo sapiens
GLRISVQERIKACFTESIQTQIAAAEALPDAISRAAMTLVQSLLNGNKILCCGNGTSAANAQHFAASMINRFETERPSLPAIALNTDNVVLTAIANDRLHDEVYAKQVRALGHAGDVLLAISTRGNSRDIVKAVEAAVTRDTTIV

SEQ ID NO: 783 - protein, 102 aa, Homo sapiens
KQTQHAPGMMKKYLALALIAPLLISCSTTKKGDTYNEAWVKDTNGFDILMGQFAHNIENIWGFKEVVIAGPKDYVKYTDQYQTRSHINFDDGTITIEPIPGT

SEQ ID NO: 784 - protein, 78 aa, Homo sapiens
TDRTALNPGQESAMNRLFSGRSDMPFALLLLAPSLLLLGGLVAWPMVSNIEISFLRLPLNPNIESTFVGVSNYVRILS

SEQ ID NO: 785 - protein, 148 aa, Homo sapiens
KELVDEKSERGRAMDPVSQLASAGTFRVLKEPLAFLRALELLFAIFAFATCGGYSGGLRLSVDCVNKTESNLSIDIAFAYPFRLHQVTFEVPTCEGKERQKLALIGDSSSSAEFFVTVAVFAFLYSLAATGRYIFFHNKNRENNRGPL

SEQ ID NO: 786 - protein, 246 aa, Homo sapiens
LGTVSYGADTMDEIQSHVRDSYSQMQSQAGGNNTGSTPLRKAQSSAPKVRKSVSSRIHEAVKAIVLCHNVTPVYESRAGVTEETEFAEADQDFSDENRTYQASSPDEVALVQWTESVGLTLVSRDLTSMQLKTPSGQVLSFCILQLFPFTSESKRMGVIVRDESTAEITFYMKGADVAMSPIVQYNDWLEEECGNMAREGLRTLVVAKKALTEEQYQDFEVSRLPGIPSSYDGAFLTLKLVLPVFV

SEQ ID NO: 787 - protein, 176 aa, Homo sapiens
EGPHRRLFQMVKALQEAPEDPNQILIGYSRGLVVIWDLQGSRVLYHFLSSQQLENIWWQRDGRLLVSCHSDGSYCQWPVSSEAQQPEPLRSLVPYGPFPCKAITRILWLTTRQGLPFTIFQGGMPRASYGDRHCISVIHDGQQTAFDFTSRVIGFTVLTEADPAASRRASGVGAQG

SEQ ID NO: 788 - protein, 180 aa, Homo sapiens
KQGLEVRDLHFKEITSGRALLRVACKRPSMVPGGQLQRAGAGAQARITGLSPALWGARVHGWIPELPAGLPPGACLWPLIPACPSRHWGWVSAPVKGWAQAILGLALCLRGEHRGLGAGVSKVRSLKMDRKVWTETLIEVGMPLLATDTWGLPHSTAVWVSQPPPYLSDHSTLELERDPL

SEQ ID NO: 789 - protein, 145 aa, Homo sapiens
LSCNSEQALLSLVPVQRELLRRRYQSSPAKPDSSFYKGLGTCPSQLRLSEPPPTPRHLSVASVSHHMFPSHRSLCPHLPDFFAAPFPSDNLPYTLQSPFPSPPPATPSDHALILHHDLNGGPDDPLQQTGQLFGGLVRDIRRRYP

SEQ ID NO: 790 - protein, 65 aa, Homo sapiens
SPSSKLVGMWWAGRAGSSRTTSVSLLCLPSAPFGASNLLVNPLEPQNADKIKIKIADLGNACWVV

SEQ ID NO: 791 - protein, 144 aa, Homo sapiens
RVDPRVRAPRCGDKIKNHMYKCDCGSLKDCASDRCCETSCTLSLGSVCNTGLCCHKCKYAAPGVVCRDLGGICDLPEYCDGKKEECPNDIYIQDGTPCSAVSVCIRGNCSDRDMQCQALFGYQVKDGSPACYRKLNRIGNRFGT

SEQ ID NO: 792 - protein, 242 aa, Homo sapiens
PGRPTRPDASLAQDPRTTMFRIPEFKWSPMHQRLLTDLLFALETDVHVWRSHSTKSVMDFVNSNENIIFVHNTIHLISQMVDNIIIACGGILPLLSAATSPTGSKTELENIEVTQGMSAETAVTFLSRLMAMVDVLVFASSLNFSEIEAEKNMSSGGLMRQCLKLVCCVAVRNCLECRQRQRDRGNKSSHGSSKPQEVPQSVTATAASKTPLENVPGNLSPIKDPDRLLQDVDINRLRAVVF

SEQ ID NO: 793 - protein, 412 aa, Homo sapiens
NSSGVKLLQALGLSPGNGKDHSILHSRNDLEEAFIHFMGKGAAAERFFSDKETFHDIAQVASEFPGAQHYVGGNAALIGQKFAANSDLKVLLCGPVGPKLHELLDDNVFVPPESLQEVDEFHLILEYQAGEEWGQLKAPHANRFIFSHDLSNGAMNMLEVFVSSLEEFQPDLGGLSGLHMMEGQSKELQRKRLLEVVTSISDIPTGIPVHLELGSMTNRELMSSIVLQQVFPAVTSLGLNEQELLFLTQSASGPHSSLSSWNGVPDVGMVSDILFWILKEHGRSKSRASDLTRIHFHTLVYHILATVDGHWANQLAAVAAGARVAGTQACATETIDTSRVSLRAPQEFMTSHSEAGSRIVLNPNKPVVEWHREGISFHFTPVLVCKDPIRTVGLGDAISAEGLFYSEVHPHY

SEQ ID NO: 794 - protein, 83 aa, Homo sapiens
DDSSGWGLEQLVVRWSLALWPRLECSGMISAHCNLCLLGSSDSPASAPRVAGITDVCHHAWLVFVFLVVMGFPHVGHVGLELL

SEQ ID NO: 795 - protein, 391 aa, Homo sapiens
LGEVLKCQQGVSSLAFALAFLQRMDMKPLVVLGLPAPTAPSGCLSFWEAKAQLAKSCKVLVDALRHNAAAAVPFFGGGSVLRAAEPAPHASYGGIVSVETDLLQWCLESGSIPILCPIGETAARRSVLLDSLEVTASLAKALRPTKIIFLNNTGGLRDSSHKVLSNVNLPADLDLVCNAEWVSTKERQQMRLIVDVLSRLPHHSSAVITAASTLLTELFSNKGSGTLFKNAERMLRVRSLDKLDQGRLVDLVNASFGKKLRDDYLASLRPRLHSIYVSEGYNAAAILTMEPVLGGTPYLDKFVVSSSRQGQGSGQMLWECLRRDLQTLFWRSRVTNPINPWYFKHSDGSFSNKQWIFFWFGLADIRDSYELVNHAKGLPDSFHKPASDPGS

SEQ ID NO: 796 - protein, 127 aa, Homo sapiens
  misc_feature (1)...(127): Xaa = any amino acid or other as shown in Table 3
YHAPALQPGQQSKTLSQEKKNFFRPGAVAHTCNPSTLGGRGGRITRSGDRDHPGXHGETPSLLKIQKKLAGRDGGRLXSQLLGRLRQENGVNPGGGGCSEPRLRHCTPAWXQSETISRKKRKKERKY

SEQ ID NO: 797 - protein, 159 aa, Homo sapiens
FRPIGIIRQALCSADGHQRRILTLRLGLLVIPFLPASNLFFRVGFVVPSVGCCVMLLFGFGALRKHTEKKKLIAAVVLGILLSNDAERLRCAVRGGEWRSEEAVFRGAVSVCPLSAEVRCNIGRNLAAKGNQTGAIRYHREAVSLNPKTKSSTREFRPC

SEQ ID NO: 798 - protein, 236 aa, Homo sapiens
KIADFGFSNLFTPGQLLKTWCGSPPYAAPELFEGKEYDGPKVDIWSLGVVLYVLVCGALPFDGSTLQNLRARVLSGKFRIPFFMSTECEHLIRHMLVLDPNKRLSMEQICKHKWMKLGDADPNFDRLIAECQQLKEERQVDPLNEDVLLAMEDMGLDKEQTLQSLRSDAYDHYSAIYSLLCDRHKRHKTLRLGALPSMPRALGLSSTSQYPAEQAGTAMNISVPQVQLINPENQIV

SEQ ID NO: 799 - protein, 114 aa, Homo sapiens
  misc_feature (1)...(114): Xaa = any amino acid or other as shown in Table 3
AREFLGHRASITWSXARVHHRFPKAEVAXPSLLRTDLTEDRTKCCHGDLLECADDRADLVEDIWENQDSISTILIECCEKPLLEKSHCIAEVENDEMPADLPSLAADFVESKDV

SEQ ID NO: 800 - protein, 328 aa, Homo sapiens
  misc_feature (1)...(328): Xaa = any amino acid or other as shown in Table 3
VPPKMKRGTSLHSRRGKPEAPKGSPQINRKSGQEMTAVMQSGRPRSSSTTDAPTGSAMMEIACAAAAAAAACLPGEEGTAERIERLEVSSLAQTSSAVASSTDGSIHTDSVDGTPDPQRTKAAIAHLQQKILKLTEQIKIAQTARRNRRPGSXKDCTPXKCLRKSDEALNRVLQQIRVPPKMKRGTSLHSRRGKPEAPKGSPQINRKSGQEMTAVMQSGRPRSSSTTDAPTGSAMMEIACAAAAAAAACLPGEEGTAERIERLEVSSLAQTSSAVASSTDGSIHTDSVDGTPDPQRTKAAIAHLQQKILKLTEQIKIAQTARRNRRPG

SEQ ID NO: 801 - protein, 355 aa, Homo sapiens
MQTIERLVKERDDLMSALVSVRSSLADTQQREASAYEQVKQVLQISEEANFEKTKALIQCDQLRKELERQAERLEKELASQQEKRAIEKDMMKKEITKEREYMGSKMLILSQNIAQLEAQVEKVTKEKISAINQLEEIQSQLASREMDVTKVCGEMRYQLNKTNMEKDEAEKEHREFRAKTNRDLEIKDQEIEKLRIELDESKQHLEQEQQKAALAREECLRLTELLGESEHQLHLTRQEKDSIQQSFSKEAKAQALQAQQREQELTQKIQQMEAQHDKTENEQYLLLTSQNTFLTKLKEECCTLAKKLEQISQKTRSEIAQLSQEKRYTYDKLGKLQRRNEELEEQCVQHGRST

SEQ ID NO: 802 - protein, 210 aa, Homo sapiens
SYPVWWNSPLTAEVPPELLAAAGFFHTGHQDKVRCFFCYGGLQSWKRGDDPWTEHAKWFPSCQFLLRSKGRDFVHSVQETHSQLLGSWDPWEEPEDAAPVAPSVPASGYPELPTPRREVQSESAQEPGGVSPAEAQRAWWVLEPPGARDVEAQLRRLQEERTCKVCLDRAVSIVFVPCGHLVCAECAPGLQLCPICRSPCGPLRPCLWVP

SEQ ID NO: 803 - protein, 129 aa, Homo sapiens
MCSYREKKAEPQELLQLDGYTVDYTDPQPGLEGGRAFFNAVKEGDTVIFASDDEQDRILWVQAMYRATGQSHKPVPPTQVQKLNAKGGNVPQLDAPISQFYADRAQKHGMDEFISSNPCNFDHASLFEM

SEQ ID NO: 804 - protein, 458 aa, Homo sapiens
KQLIVLGNKVDLLPQDAPGYRQRLRERLWEDCARAGLLLAPGHQGPQRPVKDEPQDGENPNPPNWSRTVVRDVRLISAKTGYGVEELISALQRSWRYRGDVYLVGATNAGKSTLFNTLLESDYCTAKGSEAIDRATISPWPGTTLNLLKFPICNPTPYRMFKRHQRLKKDSTQAEEDLSEQEQNQLNVLKKHGYVVGRVGRTFLYSEEQKDNIPFEFDADSLAFDMENDPVMGTHKSTKQVELTAQDVKDAHWFYDTPGITKENCILNLLTEKEVNIVLPTQSIVPRTFVLKPGMVLFLGAIGRIDFLQGNQSAWFTVVASNILPVHITSLDRADALYQKHAGHTLLQIPMGGKERMAGFPPLVAEDIMLKEGLGASEAVADIKFSSAGWVSVTPNFKDRLHLRGYTPEGTVLTVRPPLLPYIVNIKGQRIKKSVAYKTKKPPSLMYNVRKKKGKINV

SEQ ID NO: 805 - protein, 290 aa, Homo sapiens
STVASMMHRQETVECLRKFNARRKLKGAILTTMLVSRNFSAAKSLLNKKSDGGVKPQSNNKNSLVSPAQEPAPLQTAMEPQTTVVHNATDGIKGSTESCNTTTEDEDLKAAPLRTGNGSSVPEGRSSRDRTAPSAGMQPQPSLCSSAMRKQEIIKITEQLIEAINNGDFEAYTKICDPGLTSFEPEALGNLVEGMDFHKFYFENLLSKNSKPIHTTILNPHVHVIGEDAACIAYIRLTQYIDGQGRPSNPAKSEETRVWHRRDGKWLNVHYHCSGAPCPHRCSELSHRGF

SEQ ID NO: 806 - protein, 570 aa, Homo sapiens
LPKNVVFVLDSSASMVGTKLRQTKDALFTILHDLRPQDRFSIIGFSNRIKVWKDHLISVTPDSIRDGKVYIHHMSPTGGTDINGALQRAIRLLNKYVAHSGIGDRRVSLIVFLTDGKPTVGETHTLKILNNTREAARGQVCIFTIGIGNDVDFRLLEKLSLENCGLTRRVHEEEDAGSQLIGFYDEIRTPLLSDIRIDYPPSSVVQATKTLFPNYFNGSEIIIAGKLVDRKLDHLHVEVTASNSKKFIILKTDVPVRPQKAGKDVTGSPRPGGDGEGDTNHIERLWSYLTTKELLSSWLQSDDEPEKERLRQRAQALAVSYRFLTPFTSMKLRGPVPRMDGLEEAHGMSAAMGPEPVVQSVRGAGTQPGPLLKKPYQPRIKISKTSVDGDPHFVVDFPLSRLTVCFNIDGQPGDILRLVSDHRDSGVTVNGELIGAPAPPNGHKKQRTYLRTITILINKPERSYLEITPSRVILDGGDRLVLPCNQSVVVGSWGLEVSVSANANVTVTIQGSIAFVILIHLYKKPAPFQRHHLGFYIANSEGLSSNCRVFCESGILIQELTQQSVAVAGR

SEQ ID NO: 807 - protein, 279 aa, Homo sapiens
FFLEQVSQYTFAMCSYREKKSEPQELMQLEGYTVDYTDPHPGLQGGCMFFNAVKEGDTVIFASDDEQDRILWVQAMYRATGQSYKPVPAIQTQKLNPKGGTLHADAQLYADRFQKHGMDEFISANPCKLDHAFLFRILQRQTLDHRLNDSYSCLGWFSPGQVFVLDEYCARYGVRGCHRHLCYLAELMEHSENGAVIDPTLLHYSFAFCASHVHGNRPDGIGTVSVEEKERFEEIKERLSSLLENQISHFRYCFPFGRPEGALKATLSLLERVLMKDIA

SEQ ID NO: 808 - protein, 251 aa, Homo sapiens
  misc_feature (1)...(251): Xaa = any amino acid or other as shown in Table 3
DGLLHEVLNGLLDRPDWEEAVKMPVGILPCGSGNALAGAVNQHGGFEPALGLDLLLNCSLLLCRGGGHPLDLLSVTLASGSRCFSFLSVAWGFVSDVDIQSERFRALGSARFTLGTVLGLATLHTYRGRLSYLPATVEPASPTPAHSLPRAKSELTLTPDPAPPMAHSPLHRSVSDLPLPLPQPALASPGSPEPLPILSLNGGGPELAGDWGGAGDAPLSPDPQLSSPPGSPKAALHSPVXKKAPVIPPDM

SEQ ID NO: 809 - protein, 174 aa, Homo sapiens
KGVPTLLMAAGSFYDILAITGFNTCLGIAFSTGSTVFNVLRGVLEVVIGVATGSVLGFFIQYFPSRDQDKLVCKRTFLVLGLSVLAVFSSVHFGFPGSGGLCTLVMAFLAGMGWTSEKAEVEKIIAVAWDIFQPLLFGLIGAEVSISSLRPETVGLCVATVGIAVLIRIFDYIF

SEQ ID NO: 810 - protein, 104 aa, Homo sapiens
LLKEVVVQASPVCKTCCSQLVRTPVTFTEVQNVCRCSAGYLISVCSYTSSDHNQCYAGTASLALLWIGGILKGCLLWKQFRWTERSHWNFGYWALWSPGNGNGC

SEQ ID NO: 811 - protein, 77 aa, Homo sapiens
ICTSTYLQIFPGKPSCFMCKGRLMCIYFILWYLGHYTSLHWNWCRYISDPNVDACPDPRNAEVSMTHTVPALMELID

SEQ ID NO: 812 - protein, 194 aa, Homo sapiens
LESLPGFKEIVSRGVKVDYLTPDFPSLSYPNYYTLMTGRHCEVHQMIGNYMWDPTTNKSFDIGVNKDSLMPLWWNGSEPLWVTLTKAKRKVYMYYWPGCEVEILGVRPTYCLEYKNVPTDINFANAVSDALDSFKSGRADLAAIYHERIDVEGHHYGPASPQRKDALKAVDTVLKYMTKWIQERGLQDRLNVII

SEQ ID NO: 813 - protein, 116 aa, Homo sapiens
  misc_feature (1)...(116): Xaa = any amino acid or other as shown in Table 3
ARDFHPKQTLDFLRSDMANSKITEEVKRSIAQQYLDLTVALEQVDPDAEVDAAPSTTSSCGHXDSHAGSXRVLSLLGDXGPAXTGANSMAGKLLLVAWLGFPDPFWGKELSDPAFK

SEQ ID NO: 814 - protein, 121 aa, Homo sapiens
  misc_feature (1)...(121): Xaa = any amino acid or other as shown in Table 3
KQSGDVTCNCTDGRLAPSCLTCVGHCIFGGYCTMNSKMMPECQSPPHMTGPRCEEHVFSQHQPGHITSILIPMLXLLLLVLVAGVIFCHKRRVQGAKGFQHQRMTNGAMNAQIANPTYKMY

SEQ ID NO: 815 - protein, 86 aa, Homo sapiens
  misc_feature (1)...(86): Xaa = any amino acid or other as shown in Table 3
TVENAGRWLXEEAEIQAELERLERVRNLHIRELKRINNEDNSQFKDHPTLNERYLLLHLLGRGGFSEVYKVMYGLFWFFYTNVARI

SEQ ID NO: 816 - protein, 130 aa, Homo sapiens
  misc_feature (1)...(130): Xaa = any amino acid or other as shown in Table 3
MCEEFLVMGKGCSCVFXILLSNPQMWWLNDSNPETDNRQESPSQENIDRVSDMAFVPSAWTASGGVAWGNLGESGSRTGGVRAETLAPRLQVXPAHLRGHPRSNRGQGRPPWKAGKLGKCQEVLFRFAAF

SEQ ID NO: 817 - protein, 119 aa, Homo sapiens
  misc_feature (1)...(119): Xaa = any amino acid or other as shown in Table 3
FRAMFLAVQHDCRPMDKSAGSGHKSEEKREKMKRTLLKDWKTRLSYFLQNSSTPGKPKTGKKSKQQAFIKXVENPELANINSXLLNXKGELXXAXANIQNLSCRPSPEEAQLWSEAFDE

SEQ ID NO: 818 - protein, 131 aa, Homo sapiens
  misc_feature (1)...(131): Xaa = any amino acid or other as shown in Table 3
GFFNFSSPKLKGWKINSSLVLEIRKNILRFLDAERDVSVVKSSFPSKDARHSSVHRXFTQLHWGPPSHTPARPXRGFFNFSSPKLKGWKINSSLVLEIRKNILRFLDAERDVSVVKSSFPSKDARHSSVHR

SEQ ID NO: 819 - protein, 85 aa, Homo sapiens
  misc_feature (1)...(85): Xaa = any amino acid or other as shown in Table 3
RIDDQQELKRVTXYSQKEYTKKKLHKKCNIIQADIKPDNILDNESITILKLSDFGSASHVADNDITPSSSQTTSAASSPPRTLRR

SEQ ID NO: 820 - protein, 44 aa, Homo sapiens
  misc_feature (1)...(44): Xaa = any amino acid or other as shown in Table 3
SSKPWDXSLAPKHSGXTKNMDCYCIIPTCIGRERCYGTCIGDTV

SEQ ID NO: 821 - protein, 105 aa, Homo sapiens
  misc_feature (1)...(105): Xaa = any amino acid or other as shown in Table 3
NSSKKLVMEHQWKKYLRRNYQRMLNRLITLIGSCGVLXLISTIPTSRLKFLKETGHGTPMEEIPEEELSEDVEQIDHADRELRRGQNLRCKGIHRLPTHIQVGQN

SEQ ID NO: 822 - protein, 172 aa, Homo sapiens
  misc_feature (1)...(172): Xaa = any amino acid or other as shown in Table 3
KWMLLHSFKIFCLSLYPQLXCPFEFFSHSATIFHELVYKQTKIISSNQELIYEGRRLVLEPGRLAQHFPKTTEENPIFVVSREPLNTIGLIYEKISLPKVHPRYDLDGDASMAKAITGVVCYACRIASTLLLYQELMRKGIRWLIELIKDDYNETVHKKTEVVITLGFLVSR

SEQ ID NO: 823 - protein, 104 aa, Homo sapiens
  misc_feature (1)...(104): Xaa = any amino acid or other as shown in Table 3
GTRKMGPTVSPICLPGTWGDYNLMDGDLGLISGWGRTEKRDRADRLKAGRSPAAGXRKWEPGRGDPTWEESEEDVHKSKWTRCVDEKGAXCXTDNKRPLRCGVT

SEQ ID NO: 824 - protein, 99 aa, Homo sapiens
  misc_feature (1)...(99): Xaa = any amino acid or other as shown in Table 3
HELENLIKSAHSYSLYXGXYLHGAXTAEPEASFCPRRGWNRQAGAAGSRMNFRPGVLSSRQLGLPGPPDGPDYTVYYPFHRLAMVTAASRLEREHLTHL

SEQ ID NO: 825 - protein, 111 aa, Homo sapiens
  misc_feature (1)...(111): Xaa = any amino acid or other as shown in Table 3
PVPLPHPILEVCPGQXEPQSAISLTAFQVQAGASRASPGPPAPSSSKPGRKAKVASPCPDRPAPPPTXPRPAAAPGSESSPRPPRPRTGRRQQRAHARRAAARTAPWRPSC

SEQ ID NO: 826 - protein, 95 aa, Homo sapiens
HEGRRRGWASASQRFLRNWAFLTPSKVRRLKGQKAFGKLPSHSDTSLTSDLGFHHRFNPNASSSFKPSGTKFAIQYGTGRVDGILSEDKLTVSGL

SEQ ID NO: 827 - protein, 33 aa, Homo sapiens
  misc_feature (1)...(33): Xaa = any amino acid or other as shown in Table 3
GRNIMHYPNGHAICIANGHCIILXNSHNIKVWV

SEQ ID NO: 828 - protein, 178 aa, Homo sapiens
  misc_feature (1)...(178): Xaa = any amino acid or other as shown in Table 3
INLGNTCYMNSVIXALFMATDFRRQVLSLNLNGCNSLMKKLQHLFAFLAHTQREAYAPRIFFEASRPPWFTPRSQQDCSEYLRFLLDRLHEEEKILKVQASHKPSEILECSETSLQEVASKAAVLTETPRTSDGEKTLIEKMFGGKLRTHIRCLNCTSTSQKVEAFTDLSLAFWPSSS

SEQ ID NO: 829 - protein, 43 aa, Homo sapiens
  misc_feature (1)...(43): Xaa = any amino acid or other as shown in Table 3
ARDDPRVRLSLSPNFFXLASKLGKQWTPLIILANSLSGTNMGE

SEQ ID NO: 830 - protein, 259 aa, Homo sapiens
  misc_feature (1)...(259): Xaa = any amino acid or other as shown in Table 3
MHRIKLNDRMTFPEELDMSTFIDVEDEKSPQTESCTDSGAENEGSCHSDQMSNDFSNDDGVDEGICLETNSGTEKISKSGLEKNSLIYELFSVMVHSGSAAGGHYYACIKSFSDEQWYSFNDQHVSRITQEDIKKTHGGSSGSRGYYSSAFASSTNAYMLIYRLKDPARNAKFLEVDEYPEHIKNLVQKERELEEQEKRQREIERNTCKIKLFCLHPTKQVMMEDXIEVHKDKTLKEAVEMAYKMMDLEEVIPLDCCRL

SEQ ID NO: 831 - protein, 200 aa, Homo sapiens
SVMPVPALCLLWALAMVTRPASAAPMGGPELAQHEELTLLFHGTLQLGQALNGVYRTTEGRLTKARNSLGLYGRTIELLGQEVSRGRDAAQELRASLLETQMEEDILQLQAEATAEVLGEVAQAQKVLRDSVQRLEVQLRSAWLGPAYREFEVLKAHADKQSHILWALTGHVQRQRREMVAQQHRLRQIQERLHTAALPA

SEQ ID NO: 832 - protein, 225 aa, Homo sapiens
ITSVDPRVRGNASTGYGKIWLDDVSCDGDESDLWSCRNSGWGNNDCSHSEDVGVICSDASDMELRLVGGSSRCAGKVEVNVQGAVGILCANGWGMNIAEVVCRQLECGSAIRVSREPHFTERTLHILMSNSGCAGGEASLWDCIRWEWKQTACHLNMEASLICSAHRQPRLVGADMPCSGRVEVKHAHTWRSVCDSDFSLHAANVLCRELNCGDAISLSVGDHFG

SEQ ID NO: 833 - protein, 206 aa, Homo sapiens
SNYPSSRFRVAGITGVKLGMRSIPIATACTIYHKFFCETNLDAYDPYLIAMSSIYLAGKVEEQHLRTRDIINVSNRYFNPSGEPLELDSRFWELRDSIVQCELLMLRVLRFQVSFQHPHKYLLHYLVSLQNWLNRHSWQRTPVAVTAWALLRDSYHGALCLRFQAQHIAVAVLYLALQVYGVEVPAEVEADEAVGWQIYAMDTEIP

SEQ ID NO: 834 - protein, 86 aa, Homo sapiens
RGSRHAVHGWAFGLLFINKESVVMAYLFTTFNAFQGVFIFVFHCALQKKVRSRRGPGSQPPLETFPGYPGEGGEGGGDSGAPSSPQ

SEQ ID NO: 835 - protein, 110 aa, Homo sapiens
  misc_feature (1)...(110): Xaa = any amino acid or other as shown in Table 3
ARKDDLPPNMRFHEEKRLDFEWTLKAGXEKGXPSKXNKGWEGQEXXXTVRDXGISXXVKPQHLSXALQMALKRVYTLLSSWNCLEDFDQIFWGQKSALAGQWFPEVSIIP

SEQ ID NO: 836 - protein, 70 aa, Homo sapiens
  misc_feature (1)...(70): Xaa = any amino acid or other as shown in Table 3
GKQQRETLRRPSPTISVQRAGSPEHSSASHXHSPCPAPGQRVLPTALCTLMTSKHFHGCPLAGQGRAVTL

SEQ ID NO: 837 - protein, 473 aa, Homo sapiens
GVCGLPRFCGSIILCHYEMSSLGASFVQIKFDDLQFFENCGGGSFGSVYRAKWISQDKEVAVKKLLKIEKEAEILSVLSHRNIIQFYGVILEPPNYGIVTEYASLGSLYDYINSNRSEEMDMDHIMTWATDVAKGMHYLHMEAPVKVIHRDLKSRNVVIAADGVLKICDFGASRFHNHTTHMSLVGTFPWMAPEVIQSLPVSETCDTYSYGVVLWEMLTREVPFKGLEGLQVAWLVVEKNERLTIPSSCPRSFAELLHQCWEADAKKRPSFKQIISILESMSNDTSLPDKCNSFLHNKAEWRCEIEATLERLKKLERDLSFKEQELKERERRLKMWEQKLTEQSNTPLLLPLAARMSEESYFESKTEESNSAEMSCQITATSNGEGHGMNPSLQAMMLMGFGDIFSMNKAGAVMHSGMQINMQAKQNSSKTTSKRRGKKVNMALGFSDFDLSEGDDDDDDDGEEEYNDMDNSE

SEQ ID NO: 838 - protein, 47 aa, Homo sapiens
MLWETGCSAACRVTVSPTVTFATFSTRGIDAMRPGPSFLWRQQLSQG

SEQ ID NO: 839 - protein, 116 aa, Homo sapiens
  misc_feature (1)...(116): Xaa = any amino acid or other as shown in Table 3
PTLGDQPDLHSITRASRPKLCTRKNCNPLTITVHDPNSTQXYYGMSWELRFYIPGFDVGTMFTIQKILVSWSPPKPIGPLTDLGDPMFQKPPNKVDLTVPPPFLVIKDTLQKFEKI

SEQ ID NO: 840 - protein, 138 aa, Homo sapiens
  misc_feature (1)...(138): Xaa = any amino acid or other as shown in Table 3
SLNNVTLPQAKTEKDFIQLCTPGVIKQEKLGTVYCQASSPGANMIGNKMSAISVHGVSTSGGQMYHYDMNTASLSQQXDQKPIFNVIPPIPVGSENWNRCQGSGDDNLTSLGTLNFPGRTVSFSFEMESRSVAQAGVQ

SEQ ID NO: 841 - protein, 82 aa, Homo sapiens
  misc_feature (1)...(82): Xaa = any amino acid or other as shown in Table 3
RHTQECRCPHTHIHTHTHSHTHSHTHSHSHSHTTPRCSHTQPPHAQAPALCXSXEDRGQPTWKLCAHRPRLKVIKEGGWLGG

SEQ ID NO: 842 - protein, 58 aa, Homo sapiens
  misc_feature (1)...(58): Xaa = any amino acid or other as shown in Table 3
NYSLSVYLVRQLTAGTLLQKLRAKGIRNPDHSRALSEXHLSSLPHLIWIQVFLALQPS

SEQ ID NO: 843 - protein, 230 aa, Homo sapiens
  misc_feature (1)...(230): Xaa = any amino acid or other as shown in Table 3
ATYIVDFGFSTTFREGQMLTAFCGMYPYVAPERSLGQACQXPARDIQSLSVILYFRNTVGRRARTLPFYSAEASKLQEKILTGRYHAPPLLALQLDSLIKLLMLNARKCPSLXLMKNPWVKSSQKMPLIPYEEPLRGPPQTIQLMVAMGFQAKNISVAIIERKFNYPMATYLILEHTKQERKCSTIRELSLPPGVPTSPSPSTELSTFPLSLMRAHREPAFNVQPPEESQ

SEQ ID NO: 844 - protein, 258 aa, Homo sapiens
  misc_feature (1)...(258): Xaa = any amino acid or other as shown in Table 3
AKQELAKLMRIEDPSLLNSRVLLHHAKAGTIIARQGDQDVSLHFVLWGCLHVYQRMIDKAEDVCLFVAQPGELVGQLAVLTGEPLIFTLRAQRDCTFLRISKSDFYEIMRAQPSVVLSAAHTVAARMSPFVRQMDFAIDWTAVEAGRALYRCSSHRAAQARPRGGDLGVVRPCXPPRPLRQGDRSDCTYIVLNGRLRSVIQRGSGKKELVGEYGRGDLIGVVSATPTHXPLAFSRPVPRQLTRIIPGNPGSGEVFPGA

SEQ ID NO: 845 - protein, 235 aa, Homo sapiens
  misc_feature (1)...(235): Xaa = any amino acid or other as shown in Table 3
HASGWTPGTTQTLGQGTAWDTVASTPGTSETTASAEGRRTPGATRPAAPGTGSWAEGSVKAPAPIPESPPSKSRSMSNTTEGVWEGTRSSVTNRARASKDRREMTTTKADRPREDIEGVRIALDAAKKVLGTIGPPALVSETLAWEILPQATPVSKQQSQGSIGETTPAAGMWTLGTPAADVWILGTPAADVWTSMEAASGEGSAAGDLDAATGDRGPQATLSQTPAVXPWGPPG

SEQ ID NO: 846 - protein, 134 aa, Homo sapiens
  misc_feature (1)...(134): Xaa = any amino acid or other as shown in Table 3
AGTSGTGDTGPGNTAVSGTPVVSPGATPGAPGSSTPGEADIGNTSFGKSGTPTVSAASTTSSPVSKHTDAASATAVTISGSKPGTPGTPGGATSGGKITPGIAXPTLDQKSPCFSGYGGYFPVNPHQNPCADSL

SEQ ID NO: 847 - protein, 188 aa, Homo sapiens
  misc_feature (1)...(188): Xaa = any amino acid or other as shown in Table 3
RAHRCCLPLPSLSCEIQIGFSXSSIFPGQXACPCSCCRSCRRNWPQSPRCPHHPPAPCSLLLSSCLPPPLSCSWRGTSGKPPSQSPAASRSMRPRCSPRTSSLRGASCRGPGGSAPAAASGPRCRGCSRSPRRCSRSGCAAASPPRSQRRSPPLSPPPFPTSGTLLLKTSRFGSATREXSSPRPRPRP

SEQ ID NO: 848 - protein, 328 aa, Homo sapiens
  misc_feature (1)...(328): Xaa = any amino acid or other as shown in Table 3
DDVPPPAPDLYDVPPGLRRPGPGTLYDVPRERVLPPEVADGGVVDSGVYAVPPPAEREAPAEGKRLSASSTGSTRSSQSASSLEVAGPGREPLELEVAVEALARLQQGVSATVAHLLDLAGSAGATGSWRSPSEPQEPLVQDLQAAVAAVQSAVHELLEFARSAVGNAAHTSDRALHAKLSRQLQKMEDVHQTLVAHGQALDAGRGGSGATLEDLDRLVACSRAVPEDAKQLASFLHGNASLLFRRTKATAPGPEGGGTLHPNPTDKTSSIQSRPLPSPPKFTSQDSPDGQYENSEGGWMEDYDYVHLTGGRRSFXKTQKELLGKRAA

SEQ ID NO: 849 - protein, 97 aa, Homo sapiens
  misc_feature (1)...(97): Xaa = any amino acid or other as shown in Table 3
MATDEENVYGLEENAQSRQESTRRLILVGRTGAGKSATGNSILGQRRFFSRLGATSVTRACTTGSRRWDKCHVEVVDTPDIFSSQVSKTDPGCEERX

SEQ ID NO: 850 - protein, 94 aa, Homo sapiens
  misc_feature (1)...(94): Xaa = any amino acid or other as shown in Table 3
TLGLRSLTKEGGGGGDVAAFEVGTGAAASRALGQCGQLQKLIVIFIGSLCGLCTKCAVSNDLTQQEIQTPEIQQRNAXCDSRVTFTNEGGRWWG

SEQ ID NO: 851 - protein, 50 aa, Homo sapiens
  misc_feature (1)...(50): Xaa = any amino acid or other as shown in Table 3
FFFLVETRFHHIGQAGLELLTLSIKXSARLGLPKCWDDRREPPYLAGFMI

SEQ ID NO: 852 - protein, 143 aa, Homo sapiens
RRSPPPAPPPLPSPLSPPPRAPVSPASTMPILLFLIDTSASMNQRSHLGTTYLDTAKGAVETFMKLRARDPASRGDRYMLVTFEEPPYAIKAGWKENHATFMNELKNLQAEGLTTLGQSLRTAFDLLNLNRLVTGIDNYGQVG

SEQ ID NO: 853 - protein, 154 aa, Homo sapiens
NCRTYVFCFVLVFRLLFLHGSPLSPSLLSRAGLLCGSAENPTPFLCGITMAAGVSLLALVVRVILSTAILCPSGASRRQRSSEVEWGTDSGVYRLYCWRVGFLGPGGELRLGLSEARGGRVWGRGEKRCRVWAVRSLRKGFGSVAALRRGIWAG

SEQ ID NO: 854 - protein, 90 aa, Homo sapiens
  misc_feature (1)...(90): Xaa = any amino acid or other as shown in Table 3
VTPTPPQYYTCSCVLGFIACSIFLQMSLKPKVMLLTVALVACLVLFNLSQCWQRDCCSQGLGNLTEPSGTNRXGPAAVSWASLPAPSSCR

SEQ ID NO: 855 - protein, 61 aa, Homo sapiens
  misc_feature (1)...(61): Xaa = any amino acid or other as shown in Table 3
GKAGGAAGLFAKQVQKKFSRAQEKXTRRFGKTCQPEERAREERQEGPEIEFGFSFFSLSLY

SEQ ID NO: 856 - protein, 779 aa, Homo sapiens
  misc_feature (1)...(779): Xaa = any amino acid or other as shown in Table 3
PKRLFLFQDVNTLQGGGQPVVTPSVQPSLQPAHPALPQMTSQAPQPSVTGLQAPSAALMQVSSLDSHSAVSGNAQSFQPYAGMQAYAYPQASAVTSQLQPVRPLYPAPLSQPPHFQGSGDMASFLMTEARQHNTEIRMAVSKVADKMDHLMTKVEELQKHSAGNSMLIPSMSVTMETSMIMSNIQRIIQENERLKQEILEKSNRIEEQNDKISELIERNQRYVEQSNLMMEKRNNSLQTATENTQARVLHAEQEKAKVTEELAAATAQVSHLQLKMTAHQKKETELQMQLTESLKETDLLRGQLTKVQAKLSELQETSEQAQSKFKSEKQNRKQLELKVTSLEEELTDLRVEKESLEKNLSERKKKSAQERSQAEEEIDEIRKSYQEELDKLRQLLKKTRVSTDQAAAEQLSLVQAELQTQWEAKCEHLLASAKDEHLQQYQEVCAQRDAYQQKLVQLQEKSVCFACLALQAQITALTKQNEQHIKELEKNKSQMSGVEAAASDPSEKVKKIMNQVFQSLRREFELEESYNGRTILGTIMNTIKMVTLQLLNQQEQEKEESSSEEEEEKAEERPRRPSQEQSASASSGQPQAPLNRERPESPMVPSEQVVEEAVPLPPQALTTSQDGHRRKGDSEAEALSEIKDGSLPPELSCIPSHRVLGPPTSIPPEPLGPVSMDSECEESLAASPMAAKPDNPSGKVCVQGKXAPDGPTYKESSTRLFPGFQDPEEGDPLALGLESPGEPQPPQLQGKVDVHXVPPVPHKGAFQEQEGRFPQFCRE

SEQ ID NO: 857 - protein, 510 aa, Homo sapiens
  misc_feature (1)...(510): Xaa = any amino acid or other as shown in Table 3
SETAQQIIDRLRVKLAKEPGANLFLMAVQDIRVGGRQSNASYQYTLLSDDLAALREWEPKIRKKLATLPELADVNSDQQDNGAEMNLVYDRDTMARLGIDVQAANSLLNNAFGQRQISTIYQPMNQYKVVMEVDPRYTQDISALEKMFVINNEGKAIPLSYFAKWQPANAPLSVNHQGLSAALTISFNLPTGKSLSDASAAIDRAMSQLGVPSTVRGSFAGPAQVFQETMNSQVILIIAAIATVYIVLGIPYERYVHPPTILLXRPGANLFLMAVQDIRVGGRQSNASYQYTLLSDDLAALREWEPKIRKKLATLPELADVNSDQQDNGAEMNLVYDRDTMARLGIDVQAANSLLNNAFGQRQISTIYQPMNQYKVVMEVDPRYTQDISALEKMFVINNEGKAIPLSYFAKWQPANAPLSVNHQGLSAALTISFNLPTGKSLSDASAAIDRAMSQLGVPSTVRGSFAGPAQVFQETMNSQVILIIAAIATVYIVLGIPYERYVHPPTILL

SEQ ID NO: 858 - protein, 137 aa, Homo sapiens
  misc_feature (1)...(137): Xaa = any amino acid or other as shown in Table 3
IITPDAMGCQKDIAEKIQKQGGDYLFAVKGNQGRLNKAFEEKFPLKELNNPEHDSYAISEKSHGREEIRLHIVCDVPDELIDFTFEWKGLKKLCVAVSFRSIIAEQKKEPEMTVRYNISXLGIAGDISVTAISGTDD

SEQ ID NO: 859 - protein, 123 aa, Homo sapiens
  misc_feature (1)...(123): Xaa = any amino acid or other as shown in Table 3
HYLKMLTQARREVIIANAYFFPGYRFLHALRKAARRGVRIKLIIQGEPDMPIVRVGARLLYNYLVKGGVQVFEYRRRPLHGKVALMDDHWATVGSSNLHPVSXSGNLQANVILHVLRVPTLNP

SEQ ID NO: 860 - protein, 190 aa, Homo sapiens
  misc_feature (1)...(190): Xaa = any amino acid or other as shown in Table 3
CWSKSAAFHSKLATTCIVPVCAAGHCSAAWXSLRPIEALAKEVRELKXHTRXLLNPATTRELTSLGRNLNRLLKSERERYDKYRTTLTDLTHSLKTPLAVLQSTLRSLRSEKMSVSDAEPVMLEQISRISQQIGYYLHRASMRGGTLLSRELHPVAPLLDNLTSALIKGKPRKGGNVTVFPFTAMYRDGH

SEQ ID NO: 861 - protein, 241 aa, Homo sapiens
GNTVMFQHLMQKRKHTQWTYGPLTSTLYDLTEIDSSGDEQSLLELIITTKKREARQILDQTPVKELVSLKWKRYGRPYFCMLGAIYLLYIICFTMCCIYRPLKPRTNNRTSPRDNTLLQQKLLQEAYMTPKDDIRLVGELVTVIGAIIILLVEVPDIFRMGVTRFFGQTILGGPFHVLIITYAFMVLVTMVMRLISASGEVVPMSFALVLGWCNVMYFARGFQMLGPFTIMIQKMIFGDLM

SEQ ID NO: 862 - protein, 45 aa, Homo sapiens
EKAAAANIDEVQKSDVSSTGQGVIDKDALGPMMLEVAHLHFSAVF

SEQ ID NO: 863 - protein, 120 aa, Homo sapiens
LEVPSEVTPLGFAMQATKTLLLRTCCLQEFNIMEKNKGWALLGGKDGHLQGLFLLANALLERNQLLAQKVMYLLVPLLNRGNDKHKLTSAGFFVELLRSPVAKRLPSIYSVARFKDWLQD

SEQ ID NO: 864 - protein, 124 aa, Homo sapiens
  misc_feature (1)...(124): Xaa = any amino acid or other as shown in Table 3
RPAPAPSAAPEEAPSPGVKGRGMAKRRVPAPVWGGAGGGTKSARRAAAAPDTERSEEGGRAVKEAYPSSRQPPPPSPXPLRCARRCHPNLAPSMPISNREGKGKRREEKIRPLSPASTHTSARA

SEQ ID NO: 865 - protein, 120 aa, Homo sapiens
LQGVHGSSSTFCSSLSSDFDPLEYCSPKGDPQRVDMQPSVTSRPRSLDSEVPTGETQVSSHVHYHRHRHHHYKKRFQRHGRKPGPETGVPQSRPPIPRTQPQPEPPSPDQQVTRSNSAAP

SEQ ID NO: 866 - protein, 82 aa, Homo sapiens
MADPDPRYPRSSIEDDFNYGSSEASDTVHIRMAFLRRVYSILSLQDLLATVTSTDNLAFEDGRTDWLQRPDCVSFKIHVLPM

SEQ ID NO: 867 - protein, 60 aa, Homo sapiens
AGMSVVVVPPIGSSYLGLISQEHFPNEFTSGDGKKAHQDFGYFYGSSYVAASDSSRTPGL

SEQ ID NO: 868 - protein, 78 aa, Homo sapiens
VAAALTLFPQQLSPPGAWGLGLSACFCCAEGFSRLNQQVLSSSLLLLSRTNCPCKYSFLDNLKKLTPRRDVPTYPKVR

SEQ ID NO: 869 - protein, 119 aa, Homo sapiens
RDDACLYSPASAPEVITVGATNAQDQPVTLGTLGTNFGRCVDLFAPGEDIIGASSDCSTCFVSQSGTSQAAAHVAGIAAMMLSAEPELTLAELRQRLIHFSAKDVINEAWFPEDQRVLT

SEQ ID NO: 870 - protein, 34 aa, Homo sapiens
LEIKFLEQVDQFYDDNFPMEIRHLLAQWIENQDW

SEQ ID NO: 871 - protein, 154 aa, Homo sapiens
EAGDADEDEADANSSDCEPEGPVEAEEPPQEDSSSQSDSVEDRSEDEEDEHSEEEETSGSSASEESESEESEDAQSQSQADEEEEDDDFGVEYLLARDEEQSEADAGSGPPTPGPTTLGPKKEITDIAAAAESLQPKGYTLATTQVKTPIPLLL

SEQ ID NO: 872 - protein, 118 aa, Homo sapiens
LKNLRELLLEDNQLPQIPSGLPESLTELSLIQTNIYNITKEGISRLINLKNLYLAWNCYFNKVCEKTNIEDGVFETLTNLELLSLSFNSLSHVPPKLPSSLRKLFLSNTQIKYISEED

SEQ ID NO: 873 - protein, 41 aa, Homo sapiens
MRSQALGQSAPSLTASLKELSLPRRGSFPVCPNAGRTSPLG

SEQ ID NO: 874 - protein, 70 aa, Homo sapiens
LLCVCLPVGACPSLSLLTAPLNQLMRCLRKYQSRTPSPLLHSVPSEIVFDFEPGPVFRGSWALLSWSTRP

SEQ ID NO: 875 - protein, 41 aa, Homo sapiens
QTPDKKQNDQRNRKRKAEPYETSQGSNNFVSTKVLNSNVLR

SEQ ID NO: 876 - protein, 139 aa, Homo sapiens
YFIIKGMVELVPASDTLRKIQVEYGVTGSFKDKPLAEWLRKYNPSEEEYEKASENFIYSCAGCCVATYVLGICDRHNDNIMLRSTGHMFHIDFGKFLGHAQMFGSFKRDRAPFVLTSDMAYVINGGEKPTIRFQLFVDL

SEQ ID NO: 877 - protein, 350 aa, Homo sapiens
  misc_feature (1)...(350): Xaa = any amino acid or other as shown in Table 3
PSPLPSLSLPPPVAPGGQESPSPHTAEVESEASPPPARPLPGEARLAPISEEGKPQLVGRFQVTSSKNRLSLFPCSQHPPLSLVLQNLQPLSSLQRAQIQRTVPGGGPETREALAESDRAAEGLGAGVEEEGDDGKEPQVGGSPQPLSHPSPVWMNYSYSSLCLSSEESESSGEDEEFWAELQSLRQKHLSEVETLQTLQKKEIEDLYSRLGKQPPPGIVAPAAMLSSRQRRLSKGSFPTSRRNSLQRSEPPGPGETAGHPASIFSLRPLSVDCFSPGPGGLPRGNRPPLPTSPFLTXCSPSPHTAEVESEASPPPARPLPGEARLAPISEEGKPQLVGRFPSDFIQGTG

SEQ ID NO: 878 - protein, 112 aa, Homo sapiens
RRFVSQETGNLYIAKVEKSDVGNYTCVVTNTVTNHKVLGPPTPLILRNDGVMGEYEPKIEVQFPETVPTAKGATVKLECFALGNPVPTIIWRRADGKPIARKARRHKSRVGK

SEQ ID NO: 879 - protein, 281 aa, Homo sapiens
MLRTCYVLCSQAGPRSRGWQSLSFDGGAFHLKGTGELTRALLVLRLCAWPPLVTHGLLLQAWSRRLLGSRLSGAFLRASVYGQFVAGETAEEVKGCVQQLRTLSLRPLLAVPTEEEPDSAAKSGEAWYEGNLGAMLRCVDLSRGLLEPPSLAEASLMQLKVTALTSTRLCKELASWVRRPGASLELSPERLAEAMDSGQNLQVSCLNAEQNQHLRASLSRLHRVAQYARAQHVRLLVDAEYTSLNPALSLLVAALAVRWNSPGEGGPWVWNTYQACLKDTF

SEQ ID NO: 880 - protein, 29 aa, Homo sapiens
PHHRIAGDTAIDKNIHQSVSEQIKKNFAK

SEQ ID NO: 881 - protein, 45 aa, Homo sapiens
QMTNPFFLCFTTMISNCNFFKGPPGPPGEKGDRGPTGESGPRGFP

SEQ ID NO: 882 - protein, 54 aa, Homo sapiens
NGIIASFFLRTFIFCFIHIQGCQAGQTIKVQVSFDLLSLMFTFVSPCTNDLIIH

SEQ ID NO: 883 - protein, 479 aa, Homo sapiens
KLSVNHRRTHLTKLMHTVEQATLRISQSFQKTTEFDTNSTDIALKVFFFDSYNMKHIHPHMNMDGDYINIFPKRKAAYDSNGNVAVAFLYYKSIGPLLSSSDNFLLKPQNYDNSEEEERVISSVISVSMSSNPPTLYELEKITFTLSHRKVTDRYRSLCAFWNYSPDTMNGSWSSEGCELTYSNETHTSCRCNHLTHFAILMSSGPSIGIKDYNILTRITQLGIIISLICLAICIFTFWFFSEIQSTRTTIHKNLCCSLFLAELVFLVGINTNTNKLFCSIIAGLLHYFFLAAFAWMCIEGIHLYLIVVGVIYNKGFLHKNFYIFGYLSPAVVVGFSAALGYRYYGTTKVCWLSTENNFIWSFIGPACLIILVNLLAFGVIIYKVFRHTAGLKPEVSCFENIRSCARGALALLFLLGTTWIFGVLHVVHASVVTAYLFTVSNAFQGMFIFLFLCVLSRKIQEEYYRLFKNVPCCFGCLR

SEQ ID NO: 884 - protein, 143 aa, Homo sapiens
GTREAAPSRFMFLLFLLTCELAAEVAAEVEKSSDGPGAAQEPTWLTDVPAAMEFIAATEVAVIGFFQDLEIPAVPILHSMVQKFPGVSFGISTDSEVLTHYNITGNTICLFRLVDNEQLNLEDEDIESIDATKLSRFIEINSL

SEQ ID NO: 885 - protein, 52 aa, Homo sapiens
DETSGLIVREVSIEISRQQVEELFGPEDYWCQCVAWSSAGTTKSRKAYVRIA

SEQ ID NO: 886 - protein, 40 aa, Homo sapiens
GTRSIHVKLDVGKLHTQPKLAAQLRMVDDGSGKVEGLPGI

SEQ ID NO: 887 - protein, 176 aa, Homo sapiens
  misc_feature (1)...(176): Xaa = any amino acid or other as shown in Table 3
XCGEDGSFTQVQCHTYTGYCWCVTPDGKPISGSSVQNKTPVCSGSVTDKPLSQGNSGRKDDGSKPTPTMETQPVFDGDEITAPTLWIKHLVIKDSKLNNTNIRNSEKVYSCDQERQSALEEAQQNPREGIVIPECAPGGLYKPVQCHQSTGYCWCVLVDTGRPLPGTSTRYVMPSX

SEQ ID NO: 888 - protein, 48 aa, Homo sapiens
VLQLIKSQKFLNKLVILVETEKEKILRKEYVFADSKVSDSKLLKWAVR

SEQ ID NO: 889 - protein, 316 aa, Homo sapiens
RRLSLLDLQLGPLGRDPPQECSTFSPTDSGEEPGQLSPGVQFQRRQNQRRFSMEDVSKRLSLPMDIRLPQEFLQKLQMESPDLPKPLSRMSRRASLSDIGFGKLETYVKLDKLGEGTYATVFKGRSKLTENLVALKEIRLEHEEGAPCTAIREVSLLKNLKHANIVTLHDLIHTDRSLTLVFEYLDSDLKQYLDHCGNLMSMHNVKVRPRGQGPPILAATCPEAQCGDPLSPPGIRLLRWLKPSHVGKRERAMPSTSPGTGLSALPQEQTHTVCHCLAVGIKPTLNSEHQFPSLSNGSVSYLPKCREASGEARGYE

SEQ ID NO: 890 - protein, 34 aa, Homo sapiens
HERHEPSPTALAFGDHPIVQPKQLSFKIIQVNDN

SEQ ID NO: 891 - protein, 68 aa, Homo sapiens
ARGPSLLSEFHPGSDRPQERRTSYEPIHPGPSPVDHDSLESKRPRLEQASDSHYQGHITGESLPGRVH

SEQ ID NO: 892 - protein, 38 aa, Homo sapiens
GTRKEEFSAEENFLILTEMATNHVQVLVEFTKKLPGIF

SEQ ID NO: 893 - protein, 195 aa, Homo sapiens
HTHKLVAPRPGLPPTSQWPRDAGRQASGGLPSLSTGPPKGPRDGLARGHPAEWLAGSPGNNSPTQGSLPPQLDLYAGALFVHICLGWNFYLSTILTLGITALYTIAGMVPAAGRSTQGTCKGVRRPPPPTGPREQPRKWPQQEPQKFLPVSLLPGARAPSSNLASTGRGPGCCNLHGRPADAHHGGGGCHPDNQR

SEQ ID NO: 894 - protein, 86 aa, Homo sapiens
MVNHSLQETSEQNVILQHTLQQQQQMLQQETIRNGELEDTQTKLEKQVSKLEQELQKQRESSAEKLRKMEEKCESAAHEADLKRQK

SEQ ID NO: 895 - protein, 49 aa, Homo sapiens
  misc_feature (1)...(49): Xaa = any amino acid or other as shown in Table 3
VCPKWCRFLTMLGHCCYFWHVWPASXALSAGPTPTSRSFSPSPLRSIST

SEQ ID NO: 896 - protein, 127 aa, Homo sapiens
  misc_feature (1)...(127): Xaa = any amino acid or other as shown in Table 3
MRGPPVLLLQAAPMECPVPQGIPAGSSPEPAPDPPGPHFLRQERSFECRMCGKAFKRSSTLSTHLLIHSDTRPYPCQFCGKRFHQKSDMKKHTYIHTGEKPHKCQTQREPTMVLSPADKTNVKAAWX

SEQ ID NO: 897 - protein, 57 aa, Homo sapiens
HEQLTNNTATAPSATPVFGQVAASTAPSLFGQQTGITASTAVATPQVISSRFINLDF

SEQ ID NO: 898 - protein, 163 aa, Homo sapiens
  misc_feature (1)...(163): Xaa = any amino acid or other as shown in Table 3
VSVFKNCPMYXICIFLTKMFCVLIIXNKFXVHKKPLQEVEIAAITHGALQGLAYLHSHTMIHRDIKAGNILLTEPGQVKLADFGSASMASPANSFVGTPYWMAPEVILAMDEGQYDGKVDVWSLGITCIELAERKPPLFNMNAMSALYHIAQNESPTLQSNEW

SEQ ID NO: 899 - protein, 352 aa, Homo sapiens
RHARPGGGGHSNQRKMSLEQEEETQPGRLLGRRDAVPAFIEPNVRFWITERQSFIRRFLQWTELLDPTNVFISVESIENSRQLLCTNEDVSSPASADQRIQEAWKRSLATVHPDSSNLIPKLFRPAAFLPFMAPTVFLSMTPLKGIKSVILPQVFLCAYMAAFNSINGNRSYTCKPLERSLLMAGAVASSTFLGVIPQFVQMKYGLTGPWIKRLLPVIFLVQASGMNVYMSRSLESIKGIAVMDKEGNVLGHSRIAGTKAVRETLASRIVLFGTSALIPEVFTYFFKRTQYFRKNPGSLWILKLSCTVLAMGLMVPFSFSIFPQIGQIQYCSLEEKIQSPTEETEIFYHRGV

SEQ ID NO: 900 - protein, 186 aa, Homo sapiens
HASGRLEVFYNGTWGSVGRRNITTAIAGIVCRQLGCGENGVVSLAPLSKTGSGFMWVDDIQCPKTHISIWQCLSAPWERRISSPAEETWITCEDRIRVRGGDTECSGRVEIWHAGSWGTVCDDSWDLAEAEVVCQQLGCGSALAALRDASFGQGTGTIWLDDMRCKGNESFLWDCHAKPWGQSDCG

SEQ ID NO: 901 - protein, 365 aa, Homo sapiens
LGDFPQPQRQRRPGASDLPPHLAGARQWEVRFFRHLPARTLPPSLRMPEGPELHLASQFVNEACRALVFGGCVEKSSVSRNPEVPFESSAYRISASARGKELRLILSPLPGAQPQQEPLALVFRFGMSGSFQLVPREELPRHAHLRFYTAPPGPRLALCFVDIRRFGRWDLGGKWQPGRGPCVLQEYQQFRENVLRNLADKAFDRPICEALLDQRFFNGIGNYLRAEILYRLKIPPFEKARSVLEALQQHRPSPELTLSQKIRTKLQNPDLLELCHSVPKEVVQLGGRGYGSESGEEDFAAFRAWLRCYGMPGMSSLQDRHGRTIWFQGDPGPLAPKGRKSRKKKSKATQLSPEDRVEDALPPSK

SEQ ID NO: 902 - protein, 110 aa, Homo sapiens
LTWSACYWRDILRIQLWIAADILLRMLEKALLYSEHQNISNTGLSSQGLLIFAELIPAIKRTLARLLVIIASLDYGIEKPHLGTGMHRVIGLMLLYLIFANAESVIRVIG

SEQ ID NO: 903 - protein, 44 aa, Homo sapiens
FFFEMESRSAAQAGVQWCNLGSLQALPPRFTPFSCLSLPSSWDY

SEQ ID NO: 904 - protein, 190 aa, Homo sapiens
YECEELAKKLENSQRDGISRNKLALAELYEDEVKCKSSKSNRPKATVFKSPRTPPQRFYSSEHEYSGLNIVRPSTGKIVNELFKEAREHGAVPLNEATRASGDDKSKSFTGGGYRLGSSFCKRSEYIYGENQLQDVQILLKLWSNGFSLDDGELRPYNEPTNAQFLESVKRGVTLIACMPEIQQLMLEIF

SEQ ID NO: 905 - protein, 414 aa, Homo sapiens
WPCGAAPGLTHASERMFTLTTMIQALAPVMGWDRKPLKMFSSEEMRGHLHHHHKCLTKILKVEGQVPDLPSCLPLTDNTRMLASILINMLYDDLRCDPERDHFRKICEEYITGKFDPQDMDKNLNAIQTVSGILQGPFDLGNQLLGLKGVMEMMVALCGSERETDQLVAVEALIHASTKLSRATFIITNGVSLLKQIYKTTKNEKIKIRTLVGLCKLGSAGGTDYGLRQFAEGSTEKLAKQCRKWLCNMSIDTRTRRWAVEGLAYLTLDADVKDDFVQDVPALQAMFELAKTSDKTILYSVATTLVNCTNSYDVKEVIPELVQLAKFSKQHVPEEHPKDKKDFIDMRVKRLLKAGVISALACMVKADSAILTDQTKELLARVFLALCDNPKDRGTIVAQGGGKALIPLALEGTD

SEQ ID NO: 906 - protein, 296 aa, Homo sapiens
VDSVGGGSESRSLDSPTSSPGAGTRQLVKASSTGTESSDDFEERDPDLGDGLENGLGSPFGKWTLSSAAQTHQLRRLRGPAKCRECEAFMVSGTECEECFLTCHKRCLETLLILCGHRRLPARTPLFGVDFLQLPRDFPEEVPFVVTKCTAEIEHRALDVQGIYRVSGSRVRVERLCQAFENGRALVELSGNSPHDVSSVLKRFLQELTEPVIPFHLYDAFISLAKTLHADPGDDPGTPSPSPEVIRSLKTLLVQLPDSNYNTLRHLVAHLFRVAARFMENKMSANNLGIVFGPTL

SEQ ID NO: 907 - protein, 131 aa, Homo sapiens
GLHVISLHSADGRHWEDPLSELDSERVSAFLVTETLVFYLFCLLADETVVPPDVPSYLSSQGTLSDRQETVVRTEGGPQANGHIESNGKASVTVKQSSAVTVSLGAGGGLQVFTGQVPGIRWGKLGEAHAS

SEQ ID NO: 908 - protein, 124 aa, Homo sapiens
KIKHRPEEEPRWAAAGAQSAGPGAAEVAPPRPGTVAPGANGMTDSATANGDDRDPEIELFVKAGIDGESIGNCPFSQRLFMILWLKGVVFNVTTVDLKRKPADLRNLAPGTHPPFLAFNWYVKT

SEQ ID NO: 909 - protein, 111 aa, Homo sapiens
LGFSDGQEARPEEIGWLNGYNETTGERGDFPGTYVEYIGRKKISPPTPKPRPPRPLPVAPGSSKTEADVEQQVLYKYRKKPSSSHRPQTPHNGKSKNFLHKQGLKKKKASL

SEQ ID NO: 910 - protein, 298 aa, Homo sapiens
RTRGVMELALRRSPVPRWLLLLPLLLGLNAGAVIDWPTEEGKEVWDYVTVRKDAYMFWWLYYATNSCKNFSELPLVMWLQGGPGGSSTGFGNFEEIGPLDSDLKPRKTTWLQAASLLFVDNPVGTGFSYVNGSGAYAKDLAMVASDMMGLLKTFFSCHKEFQTVPFYIFSESYGGKMAAGIGLELYKAIQRGTIKCNFAGVALGDSWISPVDSVLSWGPYLYSMSLLEDKGLAEVSKVAEQVLNAVNKGLYREATELWGKAEMIIEQVKRGNTQRRACLAFSGGYRAHGWCCQTWSLH

SEQ ID NO: 911 - protein, 213 aa, Homo sapiens
  misc_feature (1)...(213): Xaa = any amino acid or other as shown in Table 3
PGWSRSPDLVIRLPRPPKVLGLQYYHFFFFLRWSLDSVAQAEVQWHDLRSLQAPPPGFTPFSCLSLPGSWDYRCPPPRPANFLYFXXRRGFTVLARMVSISXPRDPPASASQSAGITVLSLFFFFEMESCSVAQAGVQWRYLGSLQALPPGFTPFSCLSLPSSWDYRRPPPRPANFFVFLVETGVSPCXPGWSRSPDLVIRLPQPPKVLGLQV

SEQ ID NO: 912 - protein, 583 aa, Homo sapiens
PSMKTGELEKETAPLRKDADSSISVLEIHSQKAQIEEPDPPEMETSLDSSEMAKDLSSKTALSSTESCTMKGEEKSPKTKKDKRPPILECLEKLEKSKKTFLDKDAQRLSPIPEEVPKSTLESEKPGSPEAAETSPPSNIIDHCEKLASEKEVVECQSTSTVGGQSVKKVDLETLKEDSEFTKVEMDNLDNAQTSGIEEPSETKGSMQKSKFKYKLVPEEETTASENTEITSERQKEGIKLTIRISSRKKKPDSPPKVLEPENKQEKTEKEEEKTNVGRTLRRSPRISRPTAKVAEIRDQKADKKRGEGEDEVEEESTALQKTDKKEILKKSEKDTNSKVSKVKPKGKVRWTGSRTRGRWKYSSNDESEGSGSEKSSAASEEEEEKESEEAILADDDEPCKKCGLPNHPELILLCDSCDSGYHTALPFAPPLMIHPQMGGWFCPTFCPTLNLLLLEKLEDQFQDLDVALKKERALPERRKERLVYVGISIENIIPPQEPDFSEDQEEKKKDSKKSKANLLERRSTRTRKCISYRFDEFDEAIDEAIEDDIKEADGGGVGRGKDISTITGHRGKDISTILDEER

SEQ ID NO: 913 - protein, 178 aa, Homo sapiens
KRRGSFKMAELDQLPDESSSAKALVSLKEGSLSNTWNEKYSSLQKTPVWKGRNTSSAVEMPFRNSKRSRLFSDEDDRQINTRSPKRNQRVAMVPQKFTATMSTPDKKASQKIGFRLRNLLKLPKAHKWCIYEWFYSNIDKPLFEGDNDFCVCLKESFPNLKTRKLTRVEWGKIRRLMG

SEQ ID NO: 914 - protein, 157 aa, Homo sapiens
  misc_feature (1)...(157): Xaa = any amino acid or other as shown in Table 3
MPEYLRKRFGGIRIPIILAVLYLFIYIFTKISVDMYAGAIFIQQSLHLDLYLAIVGLLAITAVYTVAGGLAAVIYTDALQTLIMLIGALTLMGYSFAAVGGMEGLKEKYFLALASNRSENSSCGLPREDAFHIFRDPLTSDLPWPGVLFGMSIPSLX

SEQ ID NO: 915 - protein, 107 aa, Homo sapiens
  misc_feature (1)...(107): Xaa = any amino acid or other as shown in Table 3
XSASATSLTLSHCVDVVKGLLDFKKRRGHSIGGAPEQRYQIIPVMCCSLLATGGADRLIHLWNVVGSRLEANQTLEGAGGSITSVDFDPSGYQVLAATYNQVAQFWK

SEQ ID NO: 916 - protein, 45 aa, Homo sapiens
QKRFPSNCGRDGKLFLWGQALHIIAKLLGKWRRLGMVFFSLLLSY

SEQ ID NO: 917 - protein, 180 aa, Homo sapiens
VHVCSSKMGALSTERLQYYTQELGVRERSGHSVSLIDLWGLLVEYLLYQEENPAKLSDQQEAVRQGQNPYPIYTSVNVRTNLSGEDFAEWCEFTPYEVGFPKYGAYVPTELFGSELFMGRLLQLQPEPRICYLQGMWGSAFATSLDEIFLKTAGSGLSFLEWYRGSVNITDDCQKPQLHN

SEQ ID NO: 918 - protein, 281 aa, Homo sapiens
EFLGRPTRPAKDEGNDEGKDEGKDEGKDEGKDEGKDEGKDERKDEGKDEGKDERKDEGKDEGKDEGKDEGKDEGKDEGKDEGKDEGNDEGKDEGKDEGKDEGKDEGKDEGKDERKDEGKDEGKDERKDEGKDEGKDEGKDEGKDEGKDEGKDEGKDEGNDEGKDEGKDEGKDEGKDEGKDEGKDEGNDEGNDEGNDEGKDEGKDERNDEGKDEGKDEGKDEGKDERNDEGKDERKDEGKDEGKDEGKDEGKDEGKDEGNDEGKDERKDEGKDEGKDEGKDK

SEQ ID NO: 919 - protein, 147 aa, Homo sapiens
PSLRPAWHEGEDFSYGLQPYCGYSFQVVGEMIRNREVLPCPDDCPAWAYALMIEGWNEFPSRRARFKDIHSRLRAWGNLSNYNSSEQTSGGRNTTQTSSLSTSPLCNVSNAPYVGPKQKVPPFPQTQVIPMKGQIRPMVPPPQLYVP

SEQ ID NO: 920 - protein, 150 aa, Homo sapiens
RNSGRHPRVRWILEERKRVMQEACAKYRASSSRRAVTPRHVSRIFVEDRHRVLYCEVPKAGCSNWKRVLMVLAGLASSTADIQHNTVHYGSALKRLDTFDRQGILHRLSTYTKMLFVREPFERLVSAFRDKFEHPNSYYHPVFCMAILAR

SEQ ID NO: 921 - protein, 125 aa, Homo sapiens
IMYSISPANSEEGQELYVCTVKDDVNLDTVLLLPFLKEIAVSQLDQLSPEEQLLVKCAAIIGHSFHIDLLQHLLPGWDKNKLLQVLRALVDIHVLCWSDKSQELPAEPILMPSSIDIIDGTKEKK

SEQ ID NO: 922 - protein, 111 aa, Homo sapiens
GPHVVLVLRRCFLLSYFKGVEKAKAMPSPRILKTHLSTQLLPPSFWENNCKVRYQQLPVTEGKVSQPKRVLQTPTQSIRDHLCLSTVSDAYQQRENIKFYIQQDIHLNSFK

SEQ ID NO: 923 - protein, 69 aa, Homo sapiens
FYYICRLSKEDKAFLWEKRYYCFKHPNCLPKILASAPNWKWVNLAKTYSLLHQWPALYPLIALELLDSK

SEQ ID NO: 924 - protein, 120 aa, Homo sapiens
  misc_feature (1)...(120): Xaa = any amino acid or other as shown in Table 3
KMMIXGLFEIQQCPIGKHCNFLQVLRNPNRDLWLVSSFGKSSKGRERMGHHDEYYRLRGRHNPSPDHSYKRNGESERKRKKSHXHMSKSQERHNSPSRGRNSDRSGGRCSRSDNGRSRYR

SEQ ID NO: 925 - protein, 108 aa, Homo sapiens
  misc_feature (1)...(108): Xaa = any amino acid or other as shown in Table 3
PLSLFARVAGSRVEMPEPPGLGDEGRPLLHPGRREAVGSWVSAFAGDSTPCGPGDLSVPRREPFRLTALXPHRSPVVRTSLIGLLLGFSVKEELRGVGWAARTPLGIR

SEQ ID NO: 926 - protein, 305 aa, Homo sapiens
FDKRQHEARIQQMENEIHYLQENLKSMEEIQGLTDLQLQEADEEKERILAQLRELEKKKKLEDAKSQEQVFGLDKELKKLKKAVATSDKLATAELTIAKDQLKSLHGTVMKINQERAEELQEAERFSRKAAQAARDLTRAEAEIELLQNLLRQKGEQFRLEMEKTGVGTGANSQVLEIEKLNETMERQRTEIARLQNVLYLTGSDNKGGFENVLEEIAELRREGSYQNDYISSMADPFKRRGYWYFMPPPPSSKVSSHSSQATKDSGVGLKYSASTPVRKPRPGQQDGKEGSQPPPASGYWVYSP

SEQ ID NO: 927 - protein, 303 aa, Homo sapiens
SDASSFKTRVIVVPRPRVFPLGSAITENSLESDSQIGQFGVGFYSAFLVADKVIVTSKHNNDTQHIWESDSNEFSVIADPRGNTLGRGTTITLVLKEEASDYLELDTIKNLVKKYSQFINFPIYVWSSKTETVEEPMEEEEAAKEEKEESDDEAAVEEEEEEKKPKTKKVEKTVWDWELMNDIKPIWQRPSKEVEEDEYKAFYKSFSKESDDPMAYIHFTAEGEVTFKSILFVPTSAPRGLFDEYGSKKSDYIKLYVRRVFITDDFHDMMPKYLNFVKGVVDSDDLPLNVSRETLQQHKLLKV

SEQ ID NO: 928 - protein, 147 aa, Homo sapiens
CGSWMRRALIPPCRGGPSASDRCCSCSPSGFSAGRGRCPVQGCLRPHRVQLLRRWGPGSPAGQRLSKGFQLLRWWGPGSPAPEPRKGPFPPPDPPWPVTAVTVMAGSVPSAQSVDALESPGPLALEGPSSPRNLLWREMSIFLPGIF

SEQ ID NO: 929 - protein, 183 aa, Homo sapiens
PGPTPPPRHGSPPHRLIRVETPGPPAPPADERISGPPASSDRLAILEDYADPFDVQETGEGSAGASGAPEKVPENDGYMEPYEAQKMMAEIRGSKETATQPLPLYDTPYEPEEDGATPEGEGAPWPRESRLPEDDERPPEEYDQPWEWKKERISKAFAVDIKVIKDLPWPPPVGQLDSSPSLP

SEQ ID NO: 930 - protein, 187 aa, Homo sapiens
QFFSLFLRYQIHTGLQHSIIRPTQPNCLPLDNATLPQKLKEVGYSTHMVGKWHLGFYRKECMPTRRGFDTFFGSLLGSGDYYTHYKCDSPGMCGYDLYENDNAAWDYDNGIYSTQMYTQRVQQILASHNPTKPIFLYIAYQAVHSPLQAPGRYFEHYRSIININRRRYAAMLSCLDEAINNVTLALK

SEQ ID NO: 931 - protein, 192 aa, Homo sapiens
RVRKGRGGERLQSPLRVPQKPERPPLPPKPQFLNSGAYPQKPLRNQGVVRTLSSSAQEDIIRWFKEEQLPLRAGYQKTSDTIAPWFHGILTLKKANELLLSTGMPGSFLIRVSERIKGYALSYLSEDGCKHFLIDASADAYSFLGVDQLQHATLADLVEYHKEEPITSLGKELLLYPCGQQDQLPDYLELFE

SEQ ID NO: 932 - protein, 545 aa, Homo sapiens
GSLEKALFQLLKVWGQWAEQTRRLQRLDVSLSVARVRSAGPSCQNKGDLVMEALLEGIQNRGHGGGFLTSCEAELQELMKQIDIMVAHKKSEWEGRTHALETCLKIREQELKSLRSQLDVTHKEVGMLHQQVEEHEKIKQEMTMEYKQELKKLHEELCILKRSYEKLQKKQMREFRGNTKNHREDRSEIERLTAKIEEFRQKSLDWEKQRLIYQQQVSSLEAQRKALAEQSEIIQAQLVNRKQKLESVELSSQSEIQHLSSKLERANDTICANELEIERLTMRVNDLVGTSMTVLQEQQQKEEKLRESEKLLEALQEEKRELKAALQSQENLIHEARIQKEKLQEKVKATNTQHAVEAISLESVSATCKQLSQELMEKYEELKRMEAHNNEYKAEIKKLKEQILQGEQSYSSALEGMKMEISHLTQELHQRDITIASTKGSSSDMEKRLRAEMQKAEDKAVEHKEILDQLESLKLENRHLSEMVMKLELGLHECSLPVSPLGSIATRFLEEEELRSHHILERLDAHIEELKRESEKTVRQFTALK

SEQ ID NO: 933 - protein, 297 aa, Homo sapiens
TGFLGWSQGPSLTPTSLSALYPSQVEETGVVLSLEQTEQHSRRPIQRGAPSQKDTPNPGDSLDTPGPRILAFLHPPSLSEAALAADPRRFCSPDLRRLLGPILDGASVAATPSTPLATRHPQSPLSADLPDELPVGTENVHRLFTSGKDTEAVETDLDIAQDADALDLEMLAPYISMDDDFQLNASEQLPRAYHRPLGAVPRPRARSFHGLSPPALEPSLLPRWGSDPRLSCSSPSRGDPSASSPMAGARKRTLAQSSKDEDEGVELLGVRPPKRSPSPEHENFLLFPLSLSFLLTG

SEQ ID NO: 934 - protein, 140 aa, Homo sapiens
ELQDCFDVHDASWEEQIFWGWHNDVHIFDTKTQTWFQPEIKGGVPPQPRAAHTCAVLGNKGYIFGGRVLQTRMNDLHYLNLDTWTWSGRITINGESPKHRSWHTLTPIADDKLFLCGGLNAYNMPLSDGWIHNVTTHCWK

SEQ ID NO: 935 - protein, 97 aa, Homo sapiens
FFFLRTRSHSVTPRWECSDDITAHWQPQPWGSSDPLTFSRPQVVVPPRHTTLCPANFFVFCIFCRNRISPCWPGWSRTPWAQLIRLPRPPKVLGLQV

SEQ ID NO: 936 - protein, 245 aa, Homo sapiens
PREGQVKQGLLGDCWFLCACAALQKSRHLLDQVIPPGQPSWADQEYRGSFTCRIWQFGRWVEVTTDDRLPCLAGRLCFSRCQREDVFWLPLLEKVYAKVHGSYEHLWAGQVADALVDLTGGLAERWNLKGVAGSGGQQDRPGRWEHRTCRQLLHLKDQCLISCCVLSPRAGEARGQHGRAAASVPPTARPQAHCSFLCDWLHSPVRTKWEEVSLFSRVVSSVCDLPLLSSSRGTWPFSPLTSPFH

SEQ ID NO: 937 - protein, 211 aa, Homo sapiens
AECLEASIARYAHRVANSRYTFDGETVTLSPSQGVNQLHGGPEGFDKRRWQIVNQNDRQVLFALSSDDGDQGFPGNLGATVQYRLTDDNRISITYRATVDKPCPVNMTNHVYFNLDGEQSDVRNHKLQILADEYLPVDEGGIPHDGLKSVAGTSFDFRSAKIIASEFLADDDQRKVKGYDHAFLLQAKGDGKKVAAHVWSADEKLQLKVYT

SEQ ID NO: 938 - protein, 118 aa, Homo sapiens
PLSRFLSKESQEDWGMERQSRVMSEKDEYQFQHQGAVELLVFNFLLILTILTIWLFKNHRFRFLHETGGAMVYDKPPKFAMSREQMSQSCSHTAHNASLLTDAGPLSCGESRASCLFL

SEQ ID NO: 939 - protein, 143 aa, Homo sapiens
DSKEPRLQQLGLLEEEQLRGLGFRQTRGYKSLAGCLGHGPLVLQLLSFTLLAGLLVQVSKVPSSISQEQSRQDAIYQNLTQLKAAVGELSEKSKLQEIYQELTQLKAAVGELPEKSKLQEIYQELTWLKAAVGELPEKSKMQE

SEQ ID NO: 940 - protein, 62 aa, Homo sapiens [sequence omitted]

SEQ ID NO: 941 - protein, 238 aa, Homo sapiens
FETLSMRGIPHMLALGPQQLLAQDEEGDTLLHLFAARGLRWAAYAAAEVLQVYRRLDIREHKGKTPLLVAAAANQPLIVEDLLNLGAEPNAADHQGRSVLHVAATYGLPGVLLAVLNSGVQVDLEARDFEGLTPLHTAILALNVAMRPSDLCPRVLSTQARDRLDCVHMLLQMGANHTIQVSGDVGGQTLGDCVEWGHLDVRELQANADFASSLLRALEHVTSLLCALRVFCLFLCQL

SEQ ID NO: 942 - protein, 158 aa, Homo sapiens
DAWADAWVGTKMADLDSPPKLSGVQQPSEGVGGGRCSEISAELIRSLTELQELEAVYERLCGEEKVVERELDALLEQQNTIESKMVTLHRMGPNLQLIEGDAKQLAGMITFTCNLAENVSSKVRQLDLAKNRLYQAIQRADDILDLKFCMDGVQTALR

SEQ ID NO: 943 - protein, 235 aa, Homo sapiens
AVEFRVPRSGSAYLYSYVTVGELWAFTTGWNLILSYVIGTASVARAWSSAFDNLIGNHISKTLQGSIALHVPHVLAEYPDFFALGLVLLLTGLLALGASESALVTKVFTGVNLLVLGFVMISGFVKGDVHNWKLTEEDYELAMAELNDTYSLGPLGSGGFVPFGFEGILRGAATCFYAFVGFDCIATTGEEAQNPQRSIPMGIGISLSVCFLADFAVSSALTLMMPYYQLQPESP

SEQ ID NO: 944 - protein, 284 aa, Homo sapiens
GFHPNTTHYRARAAARAGAGSFVGEVSAVDKDFGPNGEVRYSFEMVQPDFELHAISGEITNTHQFDRESLMRRRGTAVFSFTVIATDQGIPQPLKDQATVHVYMKDINDNAPKFLKDFYQATISESAANLTQVLRVSASDVDEGNNGLIHYSIIKGNEERQFAIDSTSGQVTLIGKLDYEATPAYSLVIQAVDSGTIPLNSTCTLNIDILDENDNTPFFLLNQHFFVDVLENMRIGELGASGTATDSDSGDIADLYYKFTGTKHPPGTFSISPKHLGVFFLAQK

SEQ ID NO: 945 - protein, 119 aa, Homo sapiens
GDCYDLYGGEKFATLAELVQYYMEHHGQLKEKNGDVIELKNPLNCADPTSQRWFHGHLSGKEAEKLLTEKGKHSSFLVRESQSHPGDFVLSVCTGDDKGESNDGKSKVTHVMIHCQELK

SEQ ID NO: 946 - protein, 166 aa, Homo sapiens
IDSGNQNGGNDDKTKNAERNYLNVLPGEFYITRHSNLSEIHVAFHLCVDDHVKSGNITARDPAIMGLRNILKVCCTHDITTISIPLLLVHDMSEEMTIPWCLRRAELVFKCVKGFMMEMASWDGGISRTVQFLVPQSISEEMFYQLSNMLPQIFRVSSTLTLTSKH

SEQ ID NO: 947 - protein, 121 aa, Homo sapiens
SILPALLVTILIFMDQQITAVIVNRKENKLKKAAGYHLDLFWVGILMALCSFMGLPWYVAATVISIAHIDSLKMETETSAPGEQPQFLGVREQRVTGIIVFILTGISVFLAPILKCIPLPV

SEQ ID NO: 948 - protein, 191 aa, Homo sapiens
GASRVEAGSANGMLIDGGSQIVKVQGHADGTTINKSGSQDVVQGSLATNTTINGGRQYVEQSTVETTTIKNGGEQRVYESRALDTTIEGGTQSLNSKSTAKNTHIYSGGTQIVDNTSTSDVIEVYSGGVLDVRGGTATNVTQHDGAILKTNTNGTTVSGTNSEGAFSIHNHVADNVLLENGGHLDINAYGS

SEQ ID NO: 949 - protein, 98 aa, Homo sapiens
FFSSIQLTDDQGPVLMTTVAMPVFSKQNETRSKGILLGVVGTDVPVKELLKTIPKYKVMNDLIPEIKATEMPRALFSQSSGFKLYFGAMFLLTTITAC

SEQ ID NO: 950 - protein, 196 aa, Homo sapiens
SCSGTGTNACYMEDMSNIDLVEGDEGRMCINTEWGAFGDDGALEDIRTEFDRELDLGSLNPGKQLFEKMISGLYLGELVRLILLKMAKAGLLFGGEKSSALHTKGKIETRHVAAMEKYKEGLANTREILVDLGLEPSEADCIAVQHVCTIVSFRSANLCAAALAAILTRLRENKKVERLRTTVGMDGTLYKIHPQY

SEQ ID NO: 951 - protein, 721 aa, Homo sapiens
FVAIATNGVVPAGGSYYMISRSLGPEFGGAVGLCFYLGTTFAGAMYILGTIEILLAYLFPAMAIFKAEDASGEAAAMLNNMRVYGTCVLTCMATVVFVGVKYVNKFALVFLGCVILSILAIYAGVIKSAFDPPNFPICLLGNRTLSRHGFDVCAKLAWEGNETVTTRLWGLFCSSRFLNATCDEYFTRNNVTEIQGIPGAASGLIKENLWSSYLTKGVIVERSGMTSVGLADGTPIDMDHPYVFSDMTSYFTLLVGIYFPSVTGIMAGSNRSGDLRDAQKSIPTGTILAIATTSAVYISSVVLFGACIEGVVLRDKFGEAVNGNLVVGTLAWPSPWVIVIGSFFSTCGAGLQSLTGAPRLLQAISRDGIVPFLQVFGHGKANGEPTWALLLTACICEIGILIASLDEVAPILSMFFLMCYMFVNLACAVQTLLRTPNWRPRFRYYHWTLSFLGMSLCLALMFICSWYYALVAMLIAGLIYKYIEYRGAKKEWGDGIRGLSLSAARYALLRLEEGPPHTKNWRPQLLVLVRVDQDQNVVHPQLLSLTSQLKAGKGLTIVGSVLEGTFLENHPQAQRAEESIRRLMEAEKVKGFCQVVISSNLRDGVSHLIQSGGLGGLQHNTVLVGWPRNWRQKEDHQTWRNFIELVRETTAGHLALLVTKNVSMFPGNPERFSEGSIDRWGIGHDGGMLMLVPFLLRHHKVWRKCKMRIFTVAQMVDMHAM

SEQ ID NO: 952 - protein, 42 aa, Homo sapiens
FYLRLLSFFCFQEHEKRCWSVDFNLMDPKLLASGSDDAKGTV

SEQ ID NO: 953 - protein, 80 aa, Homo sapiens
RNSKAMHRSSCDGPLLSLPSVGRSATHALVQAQLICSGARRGMHAFIVPIRSLQDHTPLPGKPIMLPQGTLPGGEPRWPP

SEQ ID NO: 954 - protein, 202 aa, Homo sapiens
CGTLILQARAYVGPHVLAVVTRTGFCTAKGGLVSSILHPRPINFKFYKHSMKFVAALSVLALLGTIYSIFILYRNRVPLNEIVIRALDLVTVVVPPALPAAMTVCTLYAQSRLRRQGIFCIHPLRINLGGKLQLVCFDKTGTLTEDGLDVMGVVPLKGQAFLPLVPEPRRLPVGPLLRALATCHALSRLQDTPVGDPMDLKM

SEQ ID NO: 955 - protein, 188 aa, Homo sapiens
QIEYFRSLLDEHHISYVIDEDVKSGRYMELEQRYMDLAENARFEREQLLGVQQHLSNTLKMAEQDNKEAQEMIGALKERSHHMERIIESEQKGKAALAATLEEYKATVASDQIEMNRLKAQLENEKQKVAELYSIHNSGDKSDIQDLLESVRLDKEKAETLASSLQEDLAHTRNDANRLQDAIAKGRG

SEQ ID NO: 956 - protein, 132 aa, Homo sapiens
ARYRFTLSARTQVGSGEAVTEESPAPPNEATPTAAPPTLPPTTVGATGAVSSTDATAIAATTEATTVPIIPTVAPTTMATTTTVATTTTTTAAATTTTESPPTTTSGTKIHESAPDEQSIWNVTVLPNSKWA

SEQ ID NO: 957 - protein, 220 aa, Homo sapiens
LKSTQDEINQARSKLSQLHESRQEAHRSLEQYDQVLDGAHGASLTDLANLSEGVSLAERGSFGAMDDPFKNKALLFSNNTQELHPDPFQTEDPFKSDPFKGADPFKGDPFQNDPFAEQQTTSTDPFGGDPFKESDPFRGSATDDFFKKQTKNDPFTSDPFTKNPSLPSKLDPFESSDPFSSSSVSSKGSDPFGTLDPFGSGSFNSAEGFADFSTIEGRRG

SEQ ID NO: 958 - protein, 250 aa, Homo sapiens
RTRGGSGNSSQPSLREGHDKPVFNGAGKPHSSTSSPSVPKTSASRTQKSAVEHKAKKSLSHPSHSRPGPMVTPHNKAKSPGVRQPGSSSSSAPGQPSTGVARPTVSSGPVPRRQNGSSSSGPERSISGSKKPTNDSNPSRRTVSGTCGPGQPASSSGGPGRPISGSVSSARPLGSSRGPGRPVSSPHELRRPVSGLGPPGRSVSGPGRSISGSIPAGRTVSNSVPGRPVSSLGPGQTVSSSGPTIKPKCT

SEQ ID NO: 959 - protein, 48 aa, Homo sapiens
RGKGITPRYHLCISDPHNLKICCRVNGEVVQSSNTNQMVFKTEDLIAW

SEQ ID NO: 960 - protein, 63 aa, Homo sapiens
VVAVTRWLCENGVSYLRKCVCSACRHGTRCAGEVAAAANNSHCTVGIAFNAKIGGMGNQLTWM

SEQ ID NO: 961 - protein, 59 aa, Homo sapiens
GAPPPFVPTLKSDDDTSNFDEPKKNSWVSSSPCQLSPSGFSGEELPFVGFSYSKALGIL

SEQ ID NO: 962 - protein, 140 aa, Homo sapiens
FVERLAHLHAACAPRRKVALLLEVCRDVYAGLARGENQDPLGADAFLPALTEELIWSPDIGDTQLDVEFLMELLDPDELRGEAGYYLTTWFGALHHIAHYQPETDRAPRGLSSEARASLHQWHRRRTLHRKDHPRAQQLD

SEQ ID NO: 963 - protein, 153 aa, Homo sapiens
FWMDPYNPLNFKAPFQTSGENEKGCRDSKTPSESIVAISECHTLLSCKVQLLGSQESECPDSVQRDVLSGGRHTHVKRKKVTFLEEVTEYYISGDEDRKGPWEEFARDGCRFQKRIQETEDAIGYCLTFEHRERMFNRLQGTCFKGLNVLKQC

SEQ ID NO: 964 - protein, 54 aa, Homo sapiens
AASTAYSFFGTVENMAPKVVNRPGHTQSADWGSFGGLMGRFEFGIFLKGKEIVK

SEQ ID NO: 965 - protein, 39 aa, Homo sapiens
GFVFLPGPMSVGLDFSLPGMEHVYGIPEHADNLRLKVTE

SEQ ID NO: 966 - protein, 130 aa, Homo sapiens
GSECQGTDLDTRNCTSDLCVHTASGPEDVALYVGLIAVAVCLVLLLLVLILVYCRKKEGLDSDVADSSILTSGFQPVSIKPSKADNPHLLTIQPDLSTTTTTYQGSLCPRQDGPSPKFQLTNGHLLSPLG

SEQ ID NO: 967 - protein, 259 aa, Homo sapiens
LIYNEDMICWIESRESSNQLKCIQITKAGGLTDEWTINILQSFHNVQQMAIDWLTRNLYFVDHVGDRIFVCNSNGSVCVTLIDLELHNPKAIAVDPIAGKLFFTDYGNVAKVERCDMDGMNRTRIIDSKTEQPAALALDLVNKLVYWVDLYLDYVGVVDYQGKNRHAVIQGRQVRHLYGITVFEDYLYATNSDSYNIVRISRFNGTDIHSLIKIENAWGIRIYQKRTQPTVRSHACEVDPYGMPGGCSHICLLSSSYTK

SEQ ID NO: 968 - protein, 161 aa, Homo sapiens
SSGNPQPGDSSGGGAGGGLPSPGEQELSRRLQRLYPAVNQQETPLPRSWSPKDKYNYIGLSQGNLRVHYKGHGKNHKDAASVRATHPIPAACGIYYFEVKIVSKGRDGYMGIGLSAQGVNMNRLPGWDKHSYGYHGDDGHSFCSSGTGQPYGPTFTTGDVI

SEQ ID NO: 969 - protein, 76 aa, Homo sapiens
FFFFKMGSRSVTQAGVQWCDVSSLQAPPPRFTLFCLSLPSSWDYRCVPPCPANFFVFLVETGFHRVSQYGLDLLTS

SEQ ID NO: 970 - protein, 267 aa, Homo sapiens
  misc_feature (1)...(267): Xaa = any amino acid or other as shown in Table 3
QLSLARGKVFLCALSFVYFAKALAEGYLKSTITQIERRVDIPSSLVGVIDGSFEIGNLLVITFVSYFGAKLHRPKIIGAGCVIMGVGTLLIAMPQFFMEQYKYERYSPSSNSTLSISPCLLESSSQLPVSVMEKSKSKISNECEVDTSSSMWIYVFLGNLLRGIGETPIQPLGIAYLDDFASEDNAAFYIGCVQTVAIIGPIFGFLLGSLCAKLYVDIGFVNLDHFXVSAQLGTRKGVLVCLVFCLLCQSIGRRLSEEHHHSDREKG

SEQ ID NO: 971 - protein, 282 aa, Homo sapiens
QPAGRVEAFCKFHMWAEGMTSLMKAALDLTYPITSMFSGAGFNSSIFSVFKDQQIEDLWIPYFAITTDITASAMRVHTDGSLWRYVRASMSLSGYMPPLCDPKDGHLLMDGGYINNLPADVARSMGAKVVIAIDVGSRDETDLTNYGDALSGWWLLWKRWNPLATKVKVLNMAEIQTRLAYVCCVRQLEVVKSSDYCEYLRPPIDSYSTLDFGKFNEICEVGYQHGRTVFDIWGRSGVLEKMLRDQQGPSKKPASAVLTCPNASFTDLAEIVSRIEPAKPAM

SEQ ID NO: 972 - protein, 167 aa, Homo sapiens
LWVIMFVSYLILTLLHVQTAVLARPGGESIGCDDYLGSDKVVDKCGVCGGDNTGCQVVSGVFKHALTSLGYHRVVEIPEGATKINITEMYKSNNYLALRSRSGRSIINGNWAIDRPGKYEGGGTMFTYKRPNEISSTAGESFLAEGPTNEILDVYVSLDVSGLFFGF

SEQ ID NO: 973 - protein, 140 aa, Homo sapiens
ISGGTRSAGPLRRNYNFIAAVVEKVAPSVVHVQLWGRNQQWIEVVLQNGARYEAVVKDIDLKLDLAVIKIESNAELPVLMLGRSSDLRAGEFVVALGSPFSLQNTATAGIVSTKQRGGKELGMKDSDMDYVQIDATINYG

SEQ ID NO: 974 - protein, 286 aa, Homo sapiens
PRVRELKEILDRKGHFSENETRWIIQSLASAIAYLHNNDIVHRDLKLENIMVKSSLIDDNNEINLNIKVTDFGLAVKKQSRSEAMLQATCGTPIYMAPEVISAHDYSQQCDIWSIGVVMYMLLRGEPPFLASSEEKLFELIRKGELHFENAVWNSISDCAKSVLKQLMKVDPAHRITAKELLDNQWLTGNKLSSVRPTNVLEMMKEWKNNPESVEENTTEEKNKPSTEEKLKSYQPWGNVPETNYTSDEEEEKQVGRIIAAFLPSVKYPHHTWNIFLQICLFVVSL

SEQ ID NO: 975 - protein, 155 aa, Homo sapiens
LSISVSDVSLSDEGQYTCSLFTMPVKTSKAYLTVLGVPEKPQISGFSSPVMEGDLMQLTCKTSGSKPAADIRWFKNDKEIKDVKYLKEEDANRKTFTVSSTLDFRVDRSDDGVAVICRVDHESLNATPQVAMQVLEMHYTPSVKIIPSTPFPQEG

SEQ ID NO: 976 - protein, 137 aa, Homo sapiens
YNQKVDLFSLGIIFFEMSYHPMVTASERIFVLNQLRDPTSPKFPEDFDDGEHAKQKSVISWLLNHDPAKRPTATELLKSELLPPPQMEESELHEVLHHTLTNVDGKAYRTIDGPRSFRQRISPAIAYTYDSDILKGN

SEQ ID NO: 977 - protein, 246 aa, Homo sapiens
DQDYKYDSTSDDSNFLNPPRGWDHTAPGHRTFETKDQPEYDSTDGEGDWSLWSVCSVTCGNGNQKRTRSCGYACTATESRTCDRPNCPGIEDTFRTAATEVSLLAGSEEFNATKLFEVDTDSCERWMSCKSEFLKKYMHKVMNDLPSCPCSYPTEVAYSTADIFDRIKRKDFRWKDASGPKEKLEIYKPTARYCIRSMLSLESTTLAAQHCCYGDNMQLITRGKGAGTPNLISTEFSAELHYKVDV

SEQ ID NO: 978 - protein, 203 aa, Homo sapiens
ESEENGESAMDSTVAKEGTNVPLVAAGPCDDEGIVTSTGAKEEDEEGEDVVTSTGRGNEIGHASTCTGLGEESEGVLICESAEGDSQIGTVVEHVEAEAGAAIMNANENNVDSMSGTEKGSKDTDICSSAKGIVESSVTSAVSGKDEVTPVPGGCEGPMTSAASDQSDSQLEKVEDTTISTGLVGGSYDVLVSGEVPECEVAH

SEQ ID NO: 979 - protein, 94 aa, Homo sapiens
VCIICLIFSYYSFDSALQSAKSSLGGNDELSATFLEMKGHFYMYAGSLLLKMGQHGNNVQWRALSELAALCYLIAFQVSLPLGAIDISRSLDVF

SEQ ID NO: 980 - protein, 226 aa, Homo sapiens
QHPSQEKPQVLTPSPRKQKLNRKYRSHHDQMICKCLSLSISYSATIGGLTTIIGTSTSLIFLEHFNNQYPASEVVNFGTWFLFSFPISLIMLVVSWFWMHWLFLGCNFKETCSLSKKKKTKREQLSEKRIQEEYEKLGDISYPEMVTGFFFILMTVLWFTREPGFVPGWDSFFEKKGYRTDATVSVFLGFLLFLIPAKKPCFGKKNDGENQEHSLGTEPIITWKDF

SEQ ID NO: 981 - protein, 163 aa, Homo sapiens
LEREGDKGTPVLRGFSSVSGSWSRRMPPFLLLTCLFITGTSVSPVALDPCSAYISLNEPWRNTDHQLDESQGPPLCDNHVNGEWYHFTGMAGDAMPTFCIPENHCGTHAPVWLNGSHPLEGDGIVQRQACASFNGNCCLWNTTVEVKACPGGYYVYRLTKPSV

SEQ ID NO: 982 - protein, 327 aa, Homo sapiens
CGRTMSDIRHSLLRRDALSAAKEVLYHLDIYFSSQLQSAPLPIVDKGPVELLEEFVFQVPKERSAQPKRLNSLQELQLLEIMCNYFQEQTKDSVRQIIFSSLFSPQGNKADDSRMSLLGKLVSMAVAVCRIPVLECAASWLQRTPVVYCVRLAKALVDDYCCLVPGSIQTLKQIFSASPRFCCQFITSVTALYDLSSDDLIPPMDLLEMIVTWIFEDPRLILITFLNTPIAANLPIGFLELTPLVGLIRWCVKAPLAYKRKKKPPLSNGHVSNKVTKDPGVGMDRDSHLLYSKLHLSVLQVLMTLQLHLTEKNLYGPPGADPLRPHG

SEQ ID NO: 983 - protein, 110 aa, Homo sapiens
SACSTGPELPGRATRSLTRPANQKGCDGDRLYYDGCAMIAMNGSVFAQGSQFSLDDVEVLTATLDLEDVRSYRAEISSRNLAVSAPVDTCVGCSSKTWKVAPFVRAWWRP

SEQ ID NO: 984 - protein, 80 aa, Homo sapiens
APLSRLCFPQVLVNEGGGFDRASGSFVAPVRGVYSFRFHVVKVYNRQTVQVTSALAPIPGSGGWGGGRRGAQLTSGWTLH

SEQ ID NO: 985 - protein, 235 aa, Homo sapiens
PHIIGAEDDDFGTEHEQINGQCSCFQSIELLKSRPAHLAVFLRHVVSQFDPATLLCYLYSDLYKHTNSKETRRIFLEFHQFFLDRSAHLKVSVPDEMSADLEKRRPELIPEDLHRHYIQTMQERVHPEVQRHLEDFRQKRSMGLTLAESELTKLDAERDKDRLTLEKERTCAEQIVAKIEEVLMTAQAVEEDKSSTMQYVILMYMKHLGVKVKEPRNLEHKRGRIGFLPKIKQSM

SEQ ID NO: 986 - protein, 140 aa, Homo sapiens
SPGTGRGPGPTSFVCLPTPQCPFIDDFILALHRKIKNEPVVFPEGPEISEELKDLILKMLDKNPETRIGVPDIKLHPWVTKNGEEPLPSEEEHCSVVEVTEEEVKNSVRLIPSWTTVILVKSMLRKRSFGNPFEPQARMA

SEQ ID NO: 987 - protein, 242 aa, Homo sapiens
HASGIKIDKTSDGPKLFLTEEDQKKLHDFEEQCVEMYFNEKDDKFHSGSEERIRVTFERVEQMCIQIKEVGDRVNYIKRSLQSLDSQIGHLQDLSALTVDTLKTLTAQKASEASKVHNEITRELSISKHLAQNLIDDGPVRPSVWKKHGVVNTLSSSLPQGDLESNNPFHCNILMKDDKDPQCNIFGQDLPAVPQRKEFNFPEAGSSSGALFPSAVSPPELRQRLHGVELLKIFNKKQKKRA

SEQ ID NO: 988 - protein, 154 aa, Homo sapiens
CCRWIDCFALYDQQEELVRHIEKVHIDQRKGEDFTCFWAGCPRRYKPFNARYKLLIHMRVHSGEKPNKCTFEGCEKAFSRLENLKIHLRSHTGEKPYLCQHPGCQKAFSNSSDRAKHQRTHLDTKPYACQIPGCTKRYTDPSSLRKHVKAHSSK

SEQ ID NO: 989 - protein, 65 aa, Homo sapiens
LPLLWTLSDFGGTMDQSGMEIPVTLIIKAPNQKYSDQTISCFLNWTVGKLKTHLSNVYPSKPVSV

SEQ ID NO: 990 - protein, 297 aa, Homo sapiens
AGTRMCVVAAAEELVCGARGLWMRRTRRPRFVLMNKMDDLNLHYRFLNWRRRIREIREVRAFRYQERFKHILVDGDTLSYHGNSGEVGCYVASRPLTKDSNYFEVSIVDSGVRGTIAVGLVPQYYSLDHQPGWLPDSVAYHADDGKLYNGRAKGRQFGSKCNSGDRIGCGIEPVSFDVQTAQIFFTKNGKRVGSTIMPMSPDGLFPAVGMHSLGEEVRLHLNAELGREDDSVMMVDSYEDEWGRLHDVRVCGTLLEYLGKGKSIVDVGLAQARHPLSTRSHYFEVEIVDPGEKCYIA

SEQ ID NO: 991 - protein, 207 aa, Homo sapiens
QQAEEHLAAYSVSDSDSGKDPSMECCRRATPGTLLLFLAFLLLSSRTARSEEDRDGLWDAWGPWSECSRTCGGGASYSLRRCLSSKSCEGRNIRYRTCSNVDCPPEAGDFRAQQCSAHNDVKHHGQFYEWLPVSNDPDNPCSLKCQAKGTTLVVELAPKVLDGTRCYTESLDMCISGLCQVSADLFSFNLSRGFQCLCVNGLHSLTL

SEQ ID NO: 992 - protein, 184 aa, Homo sapiens
RLLRQELVVLCHLHHPSLISLLAAGIRPRMLVMELASKGSLDRLLQQDKASLTRTLQHRIALHVADGLRYLHSAMIIYRDLKPHNVLLFTLYPNAAIIAKIADYGIAQYCCRMGIKTSEGTPGFRAPEVARGNVIYNQQADVYSFGLLLYDILTTGGRIVEGLKFPNEFDELEIQGKLPDPVKE

SEQ ID NO: 993 - protein, 144 aa, Homo sapiens
KASNSTHEFRIGLPEGWESEKKAVIPLGIGPPLTLICLGVLGGILIYGRKGFQTAHFYLKDSPSPKVISTPPPPIFPISKEVGPIPIKHFPKHVANLHASRGFTEKFETLKKFYQEGQSCTVDLGITANSSNHPDNRHRNRSLI

SEQ ID NO: 994 - protein, 147 aa, Homo sapiens
SFPDRTASLVLLSVPVGQAGMQQRGLAIVALAVCAALHASPAILPIASSCCTEVSHHISRRLLERVNMCRIQRADGDCDLAAVILHVKRRRICVSPHNHTVKQWMKVQAAKKNGKGNVCHRKKHHGKRNSNRAHQGKHETYGHKTPY

SEQ ID NO: 995 - protein, 245 aa, Homo sapiens
FEQPGNPGDPRVRTPPPWGPHFFALIPSSPKEVPATPSSRRDPIAPTATLLSKKTPATLAPKEALIPPAMTVPSPKKTPAIPTPKEAPATPSSKEASSPPAVTPSTYKGAPSPKELLIPPAVTSPSPKEAPTPPAVTPPSPEKGPATPAPKGTPTSPPVTPSSLKDSPTSPASVTCKMGATVPQASKGLPAKKGPTALKEVLVAPAPESTPIITAPTRKGPQTKKSSATSPPICPDPSAKNGSKG

SEQ ID NO: 996 - protein, 25 aa, Homo sapiens
FFLKIQGLGWARWLTPVIPVLWEAE

SEQ ID NO: 997 - protein, 56 aa, Homo sapiens
AGFGYGLPISRLYAKYFQGDLNLYSLSGYGTDAIIYLKVSLEFNSKILFLKPLLLL

SEQ ID NO: 998 - protein, 198 aa, Homo sapiens
WMRAPMLQKQQAPRMDTPPPEERLEKQNEKLNNQEEETEFKELDGLREALANLRGLSEEERSEKAMLRSRIEEQSQLICILKRRSDEALERCQILELLNAELEEKMMQEAEKLKAQGEYSRKLEERFMTLAANHELMLRFKDEYKSENIKLREENEKLRLENNSLFSQALKDEEAKVLQLTVRCEALTGELETLKERC

SEQ ID NO: 999 - protein, 79 aa, Homo sapiens
DPGASHASVQVQVLKEQLFAGRMPSPFRSCALMGMCGSRSADNLSCPSPLNVMEPVSFFPLKSLGKGMIQHFRHIVSLV

SEQ ID NO: 1000 - protein, 206 aa, Homo sapiens
VTTTTHSVGRGHELQLLNEELRNIELECQNIMQAHRLQKVTDQYGDIWTLHDGGFRNYNTSIDMQRGKLDDIMEHPEKSDKDSSSAYNTAESCRSTPLTVDRSPDSSLPRVINLTNKKNLRSTMAATQSSSGQSSKESTSTKAKTTEQGCSAESKEKVLEGSKLPDQEKAVSEHIPYLSPYHSSSYRYANIPAHARHYQSYMQLIQ

SEQ ID NO: 1001 - protein, 138 aa, Homo sapiens
VWGCLATVSTHKKIQGLPFGNCLPVSDGPFNNSTGIPFFYMTAKDPVVADLMKNPMASLMLPESEGEFCRKNIVDPEDPRCVQLTLTGQMIAVSPEEVEFAKQAMFSRHPGMRKWPRQYEWFFMKMRIEHIWLQKWYG

SEQ ID NO: 1002 - protein, 133 aa, Homo sapiens
QAANMAVARVDAALPPGEGSVVNWSGQGLQKLGPNLPCEADIHTLILDKNQIIKLENLEKCKRLIQLSVANNRLVRMMGVAKLTLLRVLNLPHNSIGCVEGLKELVHLEWLNLAGNNLIAMEQINSCTALQHL

SEQ ID NO: 1003 - protein, 276 aa, Homo sapiens
FRAAVGAVPEGAWKDTAQLHKSEEAKRVLRYYLFQGQRYIWIETQQAFYQVSLLDHGRSCDDVHRSRHGLSLQDQMERKAIYGPNVISIPVKSYPQLLVDEAFSIALWLADHYYWYALCIFLISSISICLSLYKTRKQSQTLRDMVKLSMRVCVCRPGGEEEWVDSSELVPGDCLVLSQEGGLMPCDAALVAGECMVNDSSLTGESIPVLKTALPEGLGPYCAETHRRHTLFCGTLILHARAYVGPHVLAVVTRTGMSREAGLERDPGSAPLKRWS

SEQ ID NO: 1004 - protein, 222 aa, Homo sapiens
FVGGGLHLHLCLLLCFMLPEDAAMAVLTASNHVSNVTVNYNITVERMNRMQGLRVSTVPAVLSPNATLALTAGVLVDSAVEVAFLWTFGDGEQALHQFQPPYNESFPVPDPSVAQVLVEHNVTHTYAAPGEYVLTVLASNAFENRTQQVLIRSGRVPIVSLECVSCKAQAVYEVSRSSYVYLEGRCLNCSSGSKRGRWAARTFSNKTLVLDETTTSTGSASM

SEQ ID NO: 1005 - protein, 363 aa, Homo sapiens
PEFLGRLFRGKAATLHVHSDQKPLHDGALGSQQNLVRMKEALRASTMDVTVVLPSGLEKRSVLNGSHAMMDLLVELCLQNHLNPSHHALEIRSSETQQPLSFKPNTLIGTLNVHTVFLKEKVPEEKVKPGPPKVPEKSVRLVVNYLRTQKAVVRVSPEVPLQNILPVICAKCEVSPEHVVLLRDNIAGEELELSKSLNELGIKELYAWDNRRETFRKSSLGNDETDKEKKKFLGFFKVNKRSNSKGCLTTPNSPSMHSRSLTLGPSLSLGSISGVSVKSEMKKRRAPPPPGSGPPVQDKASEKVSLGSQIDLQKKKRRAPAPPPPQPPPPSPLIPNRTEDKEENRKSTMVYCCASFPTQAKRF

SEQ ID NO: 1006 - protein, 95 aa, Homo sapiens
  misc_feature (1)...(95): Xaa = any amino acid or other as shown in Table 3
VQWHNLHSLQPLPAGFKXFLCFSLPSSWDYRCAPPLPAPFFFYFLFLVELGFHHIGXAGLELTSTDLPASASESAGITGMSHRARPMDFFLLKIL

SEQ ID NO: 1007 - protein, 151 aa, Homo sapiens
GRRFRPPSDEEREPWEPWTQLRLSGHLKPLHYNLMLTAFMENFTFSGEVNVEIACRNATRYVVLHASRVAVEKVQLAEDRAFGAVPVAGFFLYPQTQVLVVVLNRTLDAQRNYNLKIIYNALIENELLGFFRSSYVLHGERRFLGVTQFSP

SEQ ID NO: 1008 - protein, 64 aa, Homo sapiens
  misc_feature (1)...(64): Xaa = any amino acid or other as shown in Table 3
KELDPFYNSXRKIKYLRIYLTKEVKDLYKENYKTLLKEITDDTNKKHIPSSWTGRINTVKMTIL

SEQ ID NO: 1009 - protein, 60 aa, Homo sapiens
VPHPLQAIHEQMNCKEYQEDLALRAQNDAAARRPSEMFKVRLAQGRGLASLSSGIQSGVG

SEQ ID NO: 1010 - protein, 44 aa, Homo sapiens
RWNSLTCVVLTFLGHRLLKRFLVPKLRRFLKPQGHPRLLLWFKR

SEQ ID NO: 1011 - protein, 219 aa, Homo sapiens
YGEFVTYQGVAVTRSRKEGIAHNYKNETEWRANIDTVMAWFTEEDLDLVTLYFGEPDSTGHRYGPESPERREMVRQVDRTVGYLRESIARNHLTDRLNLIITSDHGMTTVDKRAGDLVEFHKFPNFTFRDIEFELLDYGPNGMLLPKEGRLEKVYDALKDAHPKLHVYKKEAFPEAFHYANNPRVTPLLMYSDLGYVIHGVSRLLEAPPPGAPSPGSGS

SEQ ID NO: 1012 - protein, 89 aa, Homo sapiens
RIPLLRLRSSTYRSKGFDVTVKHSHGSWTGFGGEDLATIPKGLNTYFLVNIATIFESKNFFLPGIKWNGILGLSYATLAKPSSSLETFF

SEQ ID NO: 1013 - protein, 82 aa, Homo sapiens
IKSYSGPNGRSCQIWQRLRWGSRELLLGWKLSHSFSTCPFQFPDIVEFCEAMANAGKTVIVAALDGTFQRKVRRLIQVWSWD

SEQ ID NO: 1014 - protein, 107 aa, Homo sapiens
  misc_feature (1)...(107): Xaa = any amino acid or other as shown in Table 3
YCFCFDLLHXCIHRDVKPENILITKHSVIKLCDFGFARLLTGPSDYYTDYVATRWYRSPELPVGDTQYGPPVDVWAIGCVSAELLSGKCLWWPGKSDMLDQLYLIRK

SEQ ID NO: 1015 - protein, 70 aa, Homo sapiens
RGWALDWIGADLSLHLQEEVETEVAWEECGHVLLSLCYSSQQGGLLVGVLRCAHLAPMDANGYSDPFVRL

SEQ ID NO: 1016 - protein, 142 aa, Homo sapiens
GGILAMEYAPGGTLAEFIQKRCNSLLEEETILHFFVQILLALHHVHTHLILHRDLKTQNILLDKHRMVVKIGDFGISKILSSKSKAYTVVGTPCYISPELCEGKPYNQKSDIWALGCVLYELASLKRAFEAANLPALVLKIM

SEQ ID NO: 1017 - protein, 87 aa, Homo sapiens
VQCGGIHQVSGAVVVSGLLQGMMGLLGSPGHVFPHCGPLVLAPSLVVAGLSAHREVAQFCFTHWGLALLYVSPERRGMVPSGGVWGD

SEQ ID NO: 1018 - protein, 160 aa, Homo sapiens
PRMTGSTHASAPSYGGSCRNNLFYREETYTPKAETDEMNEVETAPIPEENHVWLQPRVMRPTKPKKTSAVNYMTQVVRCDTKMKDRCIGSTCNRYQCPAGCLNHKAKIFGSLFYESFASICRAAIHYGILDDKGGLVDITRNGKVPFFVKSERHGVQSLR

SEQ ID NO: 1019 - protein, 174 aa, Homo sapiens
VPQNIICAFFCVPCRFASTIPFWGLTLHLQHLGNNVFLLQTLFGAVTLLANCVAPWALNHMSRRLSQMLLMFLLATCLLAIIFVPQEMQTLRVVLATLGVGAASLGITCSTAQENELIPSIIRGRATGITGNFANIGGALASLVMILSIYSRPLPWIIYGVFAILSGLVVLLLP

SEQ ID NO: 1020 - protein, 225 aa, Homo sapiens
VLVSRDHMKSAQQFFQLVGGSASECDTIPGRQCMASCFFLLKQFDDVLIYLNSFKSHFYNDDIFNFNYAQAKAATGNTSEGEEAFLLIQSEKMKNDYIYLSWLARGYIMNKKPRLAWELYLKMETSGESFSLLQLIANDCYKMGQFYYSAKAFDVLERLDPNPEYWEGKRGACVGIFQMIIAGREPKETLREVLHLLRSTGNTQVEYMIRIMKKWAKENRVSILK

SEQ ID NO: 1021 - protein, 118 aa, Homo sapiens
LKVSDELVQQYQIKNQCLSAIASDAEQEPKIDPYAFVEGDEEFLFPDKKDRQNSEREAGKKHKVREITVHQRVTVDFVALHIVTLLLPQLSHFFCLRIERVIIYLEKPIFARLRWLMP

SEQ ID NO: 1022 - protein, 178 aa, Homo sapiens
GVPRNLPSSLEYLLLSYNRIVKLAPEDLANLTALRVLDVGGNCRRCDHAPNPCMECPRHFPQLHPDTFSHLSRLEGLVLKDSSLSWLNASWFRGLGNLRVLDLSENFLYKCITKTKAFQGLTQLRKLNLSFNYQKRVSFAHLVSGPPFLRGSLGRPLKGAGTWHGNLSFPLHFEWGKT

SEQ ID NO: 1023 - protein, 146 aa, Homo sapiens
ILFAALIWSSFDENIEASAGGGGGSSIDAVMVDSGAVVEQYKRMQSQESSAKRSDEQRKMKEQQAAEELREKQAAEQERLKQLEKERLAAQEQKKQAEEAAKQAELKQKQAEEAAAKAAADAKAKAEADAKAAEEAAKKAAADAKK

SEQ ID NO: 1024 - protein, 39 aa, Homo sapiens
AMEIVHEPRDLERYMREAVKVSNDSPVLLDRFLNDAIEC

SEQ ID NO: 1025 - protein, 53 aa, Homo sapiens [sequence omitted]

SEQ ID NO: 1026 - protein, 365 aa, Homo sapiens
PRVRSSGGQEDPASQQWARPRFTQPSKMRRRVIARPVGSSVRLKCVASGHPRPDITWMKDDQALTRPEAAEPRKKKWTLSLKNLRPEDSGKYTCRVSNRAGAINATYKVDVIQRTRSKPVLTGTHPVNTTVDFGGTTSFQCKVRSDVKPVIQWLKRVEYGAEGRHNSTIDVGGQKFVVLPTGDVWSRPDGSYLNKLLITRARQDDAGMYICLGANTMGYSFRSAFLTVLPDPKPPGPPVASSSSATSLPWPVVIGIPAGAVFILGTLLLWLCQAQKKPCTPAPAPPLPGHRPPGTARDRSGDKDLPSLAALSAGPGVGLCEEHGSPAAPQHLLGPGPVAGPKLYPKLYTDIPHHTHTHTPHPPAN

SEQ ID NO: 1027 - protein, 30 aa, Homo sapiens
NFHFTGKCLFMSGLSEVQLTHMDDHTLPGY

SEQ ID NO: 1028 - protein, 104 aa, Homo sapiens
SPRKRKTRHSTNPPLECHVGWVMDSRDHGPGTSSVSTSNASPSEGAPLAGSYGCTPHSFPKFQHPSHELLKENGFTQQVYHKYRRRCLSERKRLGIGQSQEMNT

SEQ ID NO: 1029 - protein, 119 aa, Homo sapiens
PGSGGSAGGRDGSAYQGALLPREQFAAPLGRPVGTSYSATYPAYVSPDVAQSWTAGPFDGSVLHGLPGRRPTFVSDFLEEFPGEGRECVNCGALSTPLWRRDGTGHYLCNACGLYHKMN

SEQ ID NO: 1030 - protein, 171 aa, Homo sapiens
  misc_feature (1)...(171): Xaa = any amino acid or other as shown in Table 3
PDHRHGALWWWYSCGVLPVTVSRNEGDERNQVLTLYLWIRQEWTDAYLRWDPNAYGGLDAIRIPSSLVWRPDIVLYNKYCLSAAPPLSYPSLDLPLAVGVXXSPLPTTXPGCHAALEAFPQDPSKLPSTQPLHGTPTLGYPRPAQAERLLGTYCVVQGRCLNHKGLSRAHF

SEQ ID NO: 1031 - protein, 198 aa, Homo sapiens
YALTGALVIVTGMVMGNIADYFNLPVSSMSNTFTFLNAGILISIFLNAWLMEIVPLKTQLRFGFLLMVLAVAGLMFSHSLALFSAAMFILGVVSGITMSIGTFLVTQMYEGRQRGSRLLFTDSFFSMAGMIFPMIAAFLLARSIEWYWVYACIGLVYVAIFILTFGCEFPALCSHATKLGTASSYPSLDVVQLRTLNA

SEQ ID NO: 1032 - protein, 137 aa, Homo sapiens
  misc_feature (1)...(137): Xaa = any amino acid or other as shown in Table 3
MAKVGLKTEHYDRYPHMFSGGQRQRIAIARGLMLDPDVVIADEPVSALDVSVRAQVLNLMMDLQQELGLSYVFISHDLSVVEHIADEVMVMYLGRCVEKGTKDQIFNNPRHPYTQALLSATPRLNPDDRRERIKLSX

SEQ ID NO: 1033 - protein, 141 aa, Homo sapiens
SATLERVLNHPDETQARRLMTLEDIVSGYSNVLISLADSQGKTVYHSPGAPDIREFTRDAIPDKDAQGGEVYLLSGPTMMMPGHGHGHMEHSNWRMINLPVGPLVDGKPIYTLYIALSIDFHLHYINDLMNKLIMTASVII

SEQ ID NO: 1034 - protein, 112 aa, Homo sapiens
VLAYPGIKVSTAEARAILPAQYRRQDCIAHGRHLAGFIHACYSRQPELAAKLMKDVIAEPYRERLLPGFRQARQAVAEIGAVASGISGSGPTLFALCDKPETAQRVADWLGK

SEQ ID NO: 1035 - protein, 92 aa, Homo sapiens
GQQQRVALARALILKPKVLLFDEPLSNLDANLRRSMRDKIRELQKQFDITSLYVTHDQSEAFAVSDTVLVMNKGHIMQIGSPQDLRVRRLNW

SEQ ID NO: 1036 - protein, 51 aa, Homo sapiens
AVHYLERVRIAEHAHKFPGQISGGQQQRVAIARSLCMKPKIMLFDEPTSAL

SEQ ID NO: 1037 - protein, 72 aa, Homo sapiens
APYDAENYFDYDNLNNGPSLQHWFGVDSLGRDIFSRVLVGAQISLAAGVFAVFIGAAIGTLLGLLAGYYEGW

SEQ ID NO: 1038 - protein, 188 aa, Homo sapiens
VFCLIADLDPIDELVDFPIVYASALNGIAGLDHEDMAEDMTPLYQAIVDHVPAPDVDLDGPFQMQISQLDYNSYVGVIGIGRIKRGKVKPNQQVTIIDSEGKTRNAKVGKVLGHLGLERIETDLAEAGDIVAITGLGELNISDTVCDTQNVEALPALSVDEPTVSMFFCVNTSPFCGKEGKFVTSRQI

SEQ ID NO: 1039 - protein, 122 aa, Homo sapiens
QGTRAESQGSSKDKTRLAFAGLKFGDYGSIDYGRNYGVAYDIGAWTDVLPEFGGDTWTQTDVFMTQRATGVATYRNNDFFGLVDGLNFAAQYQGKNDRSDFDNYTEGNGHGFGFSATYEYEG

SEQ ID NO: 1040 - protein, 65 aa, Homo sapiens
DTYSVSIPLGATINMAGAAITITVLTLAAVNTLGIPVDLPTALLLSVVASLCACGASGVAGGSLL

SEQ ID NO: 1041 - protein, 46 aa, Homo sapiens
ANAQQGLPSGITLKLNNLVDKGLVDRLYAASSSGVPVNLLVRGTCS

SEQ ID NO: 1042 - protein, 146 aa, Homo sapiens
ARMTLIPGTHLLENIHNIWVNGVGTNSAPFWRMLLNSFVMAFSITLGKITVSMLSAFAIVWFRFPLRNLFFWMIFITLMLPVEVRIFPTVEVIANLQMLDSYAGLTLPLMASATATFLFRKLNMSGPDKVVPAARISGYGPRVRKQ

SEQ ID NO: 1043 - protein, 133 aa, Homo sapiens
CAKCLRDADECPSGAFERIGRDISLDALEREVMKDDIFFRTSGGGVTLSGGEVLMQAEFATRFLQRLRLWGVSCAIETAGDAPASKLLPLAKLCDEVLFDLKIMDATQARDVVKMNLPRVLENLRLLVSEGVN

SEQ ID NO: 1044 - protein, 115 aa, Homo sapiens
YLLLFVCFLVMSLLVGLVYKFTAERAGKQSLDDLMNSSLYLMRSELREIPPHDWGKTLKEMDLNLSFDLRVEPLSKYHLDDISMHRLRGGEIVALDDQYTFLQRIPRSHYVLAVG

SEQ ID NO: 1045 - protein, 69 aa, Homo sapiens
VELFLSDEGDDVVIEVADQGCGVPESLRDKIFEQGVSTRADEPGEHGIGLYLIASYVTRCGGVITLEDN

SEQ ID NO: 1046 - protein, 69 aa, Homo sapiens
DAIIAPDANALPAAAQAAENLKNDKVAIVGFSTPNVMRPYVERGTVKEFGLWDVVQQGKISVYVADALQ

SEQ ID NO: 1047 - protein, 43 aa, Homo sapiens
YIVVTGKTHCGTPLTTVTGDATQSGYLTLNLPEMWEVSGYNRV

SEQ ID NO: 1048 - protein, 76 aa, Homo sapiens
  misc_feature (1)...(76): Xaa = any amino acid or other as shown in Table 3
XEGVEPDINASKTRQQLNDVAGKMKIIEARLSALTNNQTKSLKLNPVALPKVASQLLDELGYSLLARRADLQSAHX

SEQ ID NO: 1049 - protein, 79 aa, Homo sapiens
ENIAEEYATKRYRSNVINWGMLPLQMAEVPTFEVGDYIYIPGIKAALDNPGTTFKGYVIHEDAPVTEITLYMESQEART

SEQ ID NO: 1050 - protein, 99 aa, Homo sapiens
LQTEIGSMVYAVKPGDGSAREQAASCQRVIGGLANIAEEYATKRYRSNVINWGMLPLQMAEVPTFEVGDYIYILGFKAAKYSPGTAFTVYAISGYGPRI

SEQ ID NO: 1051 - protein, 114 aa, Homo sapiens
TLEDLLMALDGEQHLQQQVSEKVLADNVLIAPGSVKPDATFWSALIQDRYNVMTCIEKDACVLVEQDLNSDGQAERILFAFNDDRVIVYGFDSDRKEWDALDMSLLPNEITKEK

SEQ ID NO: 1052 - protein, 210 aa, Homo sapiens
ESNSRCRKMPGERCRGGPARLSLLLDLPTRPLPHPRQVIDFGSASIFSEVRYVKEPYIQSRFYRAPEILLGLPFCEKVDVWSLGCVMDELHLGWPLYPGNNEYDQVRYICETQGLPKPHLLHAACKAHHFFKRNPHPDAANPWQLKSSADYLAETKVRPLERRKYMLKSLDQIETVNGGSVASRLTFPDREALAEHADLKSMVELMKRLL

SEQ ID NO: 1053 - protein, 100 aa, Homo sapiens
RLVKKRVECRQCGKAGRNQSTLKTHMRSHTGEKPYECDHCGKAFSIGSNLNVHRRIHTGEKPYECLVCGEAFSDHSSLRSHVKTHRGEKLFVSSVWKRLQ

SEQ ID NO: 1054 - protein, 194 aa, Homo sapiens
CGPGFSLSFFFLRWSFALVAQAGVQWHDLGSLQPPAPGFKRFSSLSLLSRWDYRHAHARLIFVFLVEMGFLHVGQAGLELPTSGDPPTSASQSARITGVTTPLGTFFFFLRWSFALVAQAGGQCLDLGSLQLPPPGFKRLVCHFQTPQKHRCSCQAPGDCLQESFVMTGCVLRTVSESVQRANAGAGAETVQGL

SEQ ID NO: 1055 - protein, 351 aa, Homo sapiens
  misc_feature (1)...(351): Xaa = any amino acid or other as shown in Table 3
MGNAAAAKKGSEQESVKEFLAKAKEDFLKKWESPAQNTAHLDQFERIKTLGTGSFGRVMLVKHKETGNHYAMKILDXQKVGKLKQIEHTLNEKRILQAVNFPFLVKLEFSFKDNSNLYMVMEYVPGGEMFSHLRRIGRFSEPHARFYAAQIVLTFEYLHSLDLIYRDLKPENLLIDQQGYIQVTDFGFAKRVKGRTWTLCGTPEYLAPEIILSKGYNKAVDWWALGVLIYEMAAGYPPFFADQPIQIYEKIVSGKVRFPSHFSSDLKDLLRNLLQVDLTKRFGNLKNGVNDIKNHKWFATTDWIAIYQRKVEAPFIPKFKGPGDTSNFDDYEEEEIRVSINEKFGKEFSEF

SEQ ID NO: 1056 - protein, 136 aa, Homo sapiens
  misc_feature (1)...(136): Xaa = any amino acid or other as shown in Table 3
SSSRSSHGDSPPHSQTPCDTNRGLDTKHXDSQSIEEKDSSQSEXNRIERRKEVERILQTNSDYMXHWSNXPENILPKKFFSKHQKCTATLSMRNTSIMKKEGLFXAQFPSLLLSHLPAVGLGIYTGTHLTTSTSTF

SEQ ID NO: 1057 - protein, 79 aa, Homo sapiens
  misc_feature (1)...(79): Xaa = any amino acid or other as shown in Table 3
TFHSSLEKNILQPCRXRRAICLPLLLXPSVPLLAPQYFSDLRNSIVNSQPPEKQQAMHLCFENLMEGIERNLLTKNRDR

SEQ ID NO: 1058 - protein, 458 aa, Homo sapiens
  misc_feature (1)...(458): Xaa = any amino acid or other as shown in Table 3
GTSGVQQEISRLTNENLDLKELVEKLEKNERKLKKQLKIYMKKAQDLEAAQALAQSERKRHELNRQVTVQRKEKDFQGMLEYHKEDEALLIRNLVTDLKPQMLSGTVPCLPAYILYMCIRHADYTNDDLKVHSLLTSTINGIKKVLKKHNDDFEMTSFWLSNTCRLLHCLKQYSGDEGFMTQNTAKQNEHCLKNFDLTEYRQVLSDLSIQIYQQLIKIAEGVLQPMIVSAMLENXSIQGLSGVKPTGSQKHSSSMADEDNSYRLEAIIRQMNAFHTVMCDQGLDPEIILQVFKQLFYMINAVTLNDLLLRKDVCSWSTGMQLRYNISQLEEWLRGRNLHQSGAVQTMEPLIQAAQLLQLKKKTQEDAEAICSLCTSLSTQQIVKILNLYTPLNEFEERVTVAFIRTIQAQLQERNDPQQLLLDAKHMFPVLFPFNPSSLTMDSIHIPACLNLEFLNEV

SEQ ID NO: 1059 - protein, 82 aa, Homo sapiens
  misc_feature (1)...(82): Xaa = any amino acid or other as shown in Table 3
HEENTILKAAEVQVPPKXVVTPEAKAFIXRCLAYQKEDCIDAQQLACDPYLLHYIQKLVFVSSPAGAAIASTFGVSNSCSSN

SEQ ID NO: 1060 - protein, 277 aa, Homo sapiens
GTTDEIMTRWARVSTTYNKRPLPATSWEDMKKGSFEGTSQNLPKRKQLEANRLSLKNDAPQAKHKKNKKKKEYLNEDVNGFMEYLRQNSQMVHNGQIIATDSEEVREEIAVALKKDSRREGRRLKRQAAKKNAMVCFHCRKPGHGIADCPAALENQDMGTGICYRCGSTEHEITKCKAKVDPALGEFPFAKCFVCGEMGHLSRSCPDNPKGLYADGGGCKLCGSVEHLKKDCPESQNSERMVTVGRWAKGMSADYEEILDVPKPQKPKTKIPKVVNF

SEQ ID NO: 1061 - protein, 95 aa, Homo sapiens
  misc_feature (1)...(95): Xaa = any amino acid or other as shown in Table 3
DHVRKSLLKNRAENIVNIFKCNVVSLPNLPAFGQAQWLTPVIPALWEAEVGGSXGQEIETILANAVKSPFLLKIQKKKISRAWWRAPVSPRYSGG

SEQ ID NO: 1062 - protein, 259 aa, Homo sapiens
  misc_feature (1)...(259): Xaa = any amino acid or other as shown in Table 3
SDAWADAWARSLSVSPSSYPELHTEVPLSVLILGLLVVFILSVCFGAGLFVFVLKRRKGVPSVPRNTNNLDVSSFQLQYGSYNTETHDKTDGHVYNYIPPPVVQMCQNPIYMAGREGRPSSLLPKPGKEFQLLGNLEEKKEEPATPAYTISATELLEKQATPREPELLYQNIAEPSQGTSTAQAXSTITFVPYLKGQFAPSYESRRQNQDRINKTVLYGTPRKCFVGQSKPNHPLLQAKPQSEPDYLEVLEKQTAISQL

SEQ ID NO: 1063 - protein, 498 aa, Homo sapiens
ALCHIAVGQQMNLHWLHKIGLVVILASTVVAMSAVAQLWEDEWEVLLISLQGTAPFLHVGAVAAVTMLSWIVAGQFARAERTSSQVTILCTFFTVVFALYLAPLTISSPCIMEKKDLGPKPALIGHRGAPMLAPEHTLMSFRKALEQKLYGLQADITISLDGVPFLMHDTTLRRTTNVEEEFPELARRPASMLNWTTLQRLNAGQWFLKTDPFWTASSLSPSDHREAQNQSICSLAELLELAKGNATLLLNLRDPPREHPYRSSFINVTLEAVLHSGFPQHQVMWLPSRQRPLVRKVAPGFQQTSGSKEAVASLRRGHIQRLNLRYTQVSRQELRDYASWNLSVNLYTVNAPWLFSLLWCAGVPSVTSDNSHTLSQVPSPLWIMPPDEYCLMWVTADLVSFTLIVGIFVLQKWRLGGIRSYNPEQIMLSAAVRRTSRDVSIMKEKLIFSEISDGVEVSDVLSVCSDNSYDTYANSTATPVGPRGGGSHTKTLIERSGR

SEQ ID NO: 1064 - protein, 374 aa, Homo sapiens
NSADYGDGPDSSDADPDSGTEEGVLDFSDPFSTEVKPRILLMGLRRSGKSSIQKVVFHKMSPNETLFLESTNKICREDVSNSSFVNFQIWDFPGQIDFFDPTFDYEMIFRGTGALIFVIDSQDDYMEALARLHLTVTRAYKVNTDINFEVFIHKVDGLSDDHKIETQRDIHQRANDDLADAGLEKIHLSFYLTSIYDHSIFEAFSKVVQKLIPQLPTLENLLNIFISNSGIEKAFLFDVVSKIYIATDSTPVDMQTYELCCDMIDVVIDISCIYGLKEDGAGTPYDKESTAIIKLNNTTVLYLKEVTKFLALVCFVREESFERKGLIDYNFHCFRKAIHEVFEVRMKVVKSRKVQNRLQKKKRATPNGTPRVLL

SEQ ID NO: 1065 - protein, 278 aa, Homo sapiens
RTRGRDPGAGFRRTANKRCCRRRFLIGCGWLPLRSDWPLVSKMLSKGLKRKREEEEEKEPLAVDSWWLDPGHAAVAQAPPAVASSSLFDLSVLKLHHSLQQSEPDLRHLVLVVNTLRRIQASMAPAAALPPVPSPPAAPSVADNLLASSDAALSASMASLLEDLSHIEGLSQAPQPLADEGPPGRSIGGAAPSLGALDLLGPATGCLLDDGLEGLFEDIDTSMYDNELWAPASEGLKPGPEDGPGKEEAPELDEAELDYLMDVLVGTQALERPPGPGR

SEQ ID NO: 1066 - protein, 502 aa, Homo sapiens
  misc_feature (1)...(502): Xaa = any amino acid or other as shown in Table 3
LQEVKARRNTLHKEKDHLVNDYEQNMKLLQTKYDADINLLKQEHALSASKASSMIEELEQNVCQLKQQLQESELQRKQQLRDQENKFQMEKSHLKHIYEKKAHDLQSELDKGKEDTQKKIHKFEEALKWKKWRQIXLDPNLLREKQSKEFLWQLEDIRQRYEQQIVELKLEHEQEKTHLLQQHNAEKDSLVRDHEREIENLEKQLRAANMEHENQIQEFKKRDAQVIADMEAQVHKLREELINVNSQRKQQLVELGLLREEEKQRATREHEIVVNKLKAESEKMKIELKKTHAAETEMTLEKANSKLKQIEKEYTQKLAKSSQIIAELQTTISSLKEENSQQQLAAERRLQDVRQKFEDEKKQLIRDNDQAIKVLQDELENRSNQVRCAEKKLQHKELESQEQITYIRQEYETKLKGLMPASLRQELEDTISSLKSQVNFLQKRASILQEERDYISRQKVQPISRXLHERMQRMRISRLCCGTSSSRFEDLDIVNCEISGIF

SEQ ID NO: 1067 - protein, 301 aa, Homo sapiens
  misc_feature (1)...(301): Xaa = any amino acid or other as shown in Table 3
VINLVYLISSPRPELKPVDKESEVVMKFPDGFEKFSPPILQLDEVDFYYDPKHVIFSRLSVSADLESRICVVGENGAGKSTMLKLLLGDLAPVRGIRHAHRNLKIGYFSQHHVEQLDLNVQCLWELAGHASFPGRPEEEYRHQLGFGMGISGELAMRPLCQPVLGARKKPKWPFAQMDYCPAPTFYILDEPTNHLGHGRAIEALGPCLQTISGVGVILVSHEXSALSRLVCRELWVCXGGGVTRVERKDFDQYRALLQGTVSAREGFPLGPPRLKDSPRDMGLVSQTPWGHHVGYPLPGRG

SEQ ID NO: 1068 - protein, 215 aa, Homo sapiens
CSAVEVKMAARTAFGAVCRRLWQGLGNFSVNTSKGNTAKNGGLLLSTNMKWVQFSNLHVDVPKDLTKPVVTISDEPDILYKRLSVLVKGHDKAVLDSYEYFAVLAAKELGISIKVHEPPRKIERFTLLQSVHIYKKHRVQYEMRTLYRCLELEHLTGSTADVYLEYIQRNLPEGVAMEVTKFCFFIFLTQLEQLPEHIKEPIWETLSEEKEESKS

SEQ ID NO: 1069 - protein, 274 aa, Homo sapiens
  misc_feature (1)...(274): Xaa = any amino acid or other as shown in Table 3
DFWDTAGQERFQSMHASYYHKTHACIMVFDVQRKVTHRNLSTWYTELREFRPEIPCIVVANKIDGGAIPAPGCXQFTGDLPSYISSSIPRAGNLQXLVLPPTIRYNPWLVACILPTLXRSQLSRPALFPRHRSLLTELFLGPVSQSSLPIPLSGMKASSGPPLQTFFPSLDRQTNVLPSLYADINVTQKSFNFAKKFSLPLYFVSAADGTNVVKLFNDAIRLAVSYKQNSQDFMDEIFQELENFSLEQEEEDVPDQEQSSSIETPSEEVASPHS

SEQ ID NO: 1070 - protein, 368 aa, Homo sapiens
  misc_feature (1)...(368): Xaa = any amino acid or other as shown in Table 3
GATPLGSVGGRTGKMDAATLTYDTLRFAEFEDFPETSEPVWILGRKYSIFTEKDEILSDVASRLWFTYRKNFPAIGGTGPTSDTGWGCMLRCGQMIFAQALVCRHLGRDWRWTQRKRQPDSYFSVLNAFIDRKDSYYSIHQIAQMGVGEGKSIGQWYGPNTVAQVLKKLAVFDTWSSLAVHIAMDNTVVMEEIRRLCRTSVPCAGATAFPADSDRHCNGFPAGAEVTNRPSPWRPLVLLIPLRLGLTDINEAYVETLKHCFMMPQSLGVIGGKPNSAHYFIGXVGEELIYLDPHTTQPAVEPTDGCFIPDESFHCQHPPCRMSIAELDPSIAVVRGGHLSTQAFGAECCLGMTRKTFGFLRFFFSMLG

SEQ ID NO: 1071 - protein, 81 aa, Homo sapiens
ALCVVPFNTFHNDFLLLDKEGTLDPVMDSFSTHWTTIGPADMFFSFRQHYKNFKSHGTNPSKSVWAHATCQSCAFPNLLGW

SEQ ID NO: 1072 - protein, 494 aa, Homo sapiens
TRLAEFGTRDPCAQAPCEQQCEPGGPQGYSCHCRLGFRPAEDDPHRCVDTDECQIAGVCQQMCVNYVGGFECYCSEGHELEADGISCSPAGAMGAQASQDLGDELLDDGEDEEDEDEAWKAFNGGWTEMPGILWMEPTQPPDFALAYRPSFPEDREPQIPYPEPTWPPPLSAPRVPYHSSVLSVTRPVVVSATHPTLPSAHQPPVIPATHPALSRDHQIPVIAANYPDLPSAYQPGILSVSHSAQPPAHQPPMISTKYPELFPAHQSPMFPDTRVAGTQTTTHLPGIPPNHAPLVTTLGAQLPPQAPDALVLRTQATQLPIIPTAQPSLTTTSRSPVSPAHQISVPAATQPAALPTLLPSQSPTNQTSPISPTHPHSKAPQIPREDGPSPKLALWLPSPAPTAAPTALGEAGLAEHSQRDDRWLLVALLVPTCVFLVVLLALGIVYCTRCGPHAPNKRITDCYRWVIHAGSKSPTEPMPPRGSLTGVQTCRTSV

SEQ ID NO: 1073 - protein, 468 aa, Homo sapiens
LRVRRRPHLPAPPALRARRSDRRSSRAPAAFPPRPPHASPAPGPAMAQAVWSRLGRILWLACLLPWAPAGVAAGLYELNLTTDSPATTGAVVTISASLVAKDNGSLALPADAHLYRFHWIHTPLVLTGKMEKGLSSTIRVVGHVPGEFPVSVWVTAADCWMCQPVARGFVVLPITEFLVGDLVVTQNTSLPWPSSYLTKTVLKVSFLLHDPSNFLKTALFLYSWDFGDGTQMVTEDSVVYYNYSIIGTFTVKLKVVAEWEEVEPDATRAVKQKTGDFSASLKLQETLRGIQVLGPTLIQTFQKMTVTLNFLGSPPLTVCWRLKPECLPLEEGECHPVSVASTAYNLTHTFRDPGDYCFSIRAENIISKTHQYHKIQVWPSRIQPAVFAFPCATLITVMLAFIMYMTLRNATQQKDMVENPEPPSGVRCCCQMCCGPFLLETPSEYLEIVRENHGLLPPLYKSVKTYTV

SEQ ID NO: 1074 - protein, 288 aa, Homo sapiens
VVEFAFQLSSVSVCLTVSFGWQLGTVSSCLSRDWFLKGNLLIIIVSVLIILPLALMKHLGYLGYTSGLSLTCMLFFLVSVIYKKFQLGCAIGHNETAMESEALVGLPSQGLNSSCEAQMFTVDSQMSYTVPIMAFAFVCHPEVLPIYTELCRPSKRRMQAVANVSIGAMFCMYGLTATFGYLTFYSSVKAEMLHMYSQKDPLILCVRLAVLLAVTLTVPVVLFPIRRALQQLLFPGKAFSWPRHVAIALILLVLVNVLVICVPTIRDIFGVIGSTSAPSLIFILPSCI

SEQ ID NO: 1075 - protein, 273 aa, Homo sapiens
  misc_feature (1)...(273): Xaa = any amino acid or other as shown in Table 3
GAGSKSSMMQLMHLESFYEKPPPGLIKEDDTKPEDCIPDVPGNEHAREFLAHTPTKGLWMPLEKEVKVKHCTFHWIASXFLGDGKFIPKATRLKDVWVSNXFTCLFWDLTRFIHDCIFFXNWSLMNKNFNIIYXFFISLRXNTLILQKYFPFSLLLGWHCKWYGHRTGYKECPFFIKDNQKLQQFRVAHEDFMYDIIRDNKQHEKNVRIQQLKQLLEDSTSGEDRSSSSSSEGKEKHKKKKKKEKHKKRKKEKKKKKKRKHKSSKSNEGSDSE

SEQ ID NO: 1076 - protein, 815 aa, Homo sapiens
  misc_feature (1)...(815): Xaa = any amino acid or other as shown in Table 3
EIAGAAAENMLGSLLCLPGSGSVLLDPCTGSTISETTSEAWSVEVLPSDSEAPDLKQEERLQELESCSGLGSTSDDTDVREVSSRPSTPGLSVVSGISATSEDIPNKIEDLRSECSSDFGGKDSVTSPDMDEITHDFLYILQPKQHFQHIEAEADMRIQLSSSAHQLTSPPSQSESLLAMFDPLSSHEGASAVVRPKVHYARPSHPPPDPPILEGAVGGNEARLPNFGSPMFXLPAEMEAFKQRHSYTPERLVRSRSSDIVSSVRRPMSDPSWNRRPGNEERELPPAAAIGATSLVAAPHSSSSSPSKDSSRGETEERKDSDDEKSDRNRPWWRKRFVSAMPKAPIPFRKKEKQEKDKDDLGPDRFSTLTDDPSPRLSAQAQVAEDILDKYRNAIKRTSPSDGAMANYESTEVMGDGESAHDSPRDEALQNISADDLPDSASQAAHPQDSAFSYRDAKKKLRLALCSADSVAFPVLTHSTRNGLPDHTDPEDNEIVCFLKVQIAEAINLQDKNLMAQLQETMRCVCRFDNRTCRKLLASIAEDYRKRAPYIAYLTRCRQGLQTTQAHLERLLQRVLRDKEVANRYFTTVCVRLLLESKEKKIREFIQDFQKLTAADDKTAQVEDFLQFLYGAMAQDVIWQNASEEQLQDAQLAIERSVMNRIFKLAFYPNQDGDILRDQVLHEHIQRLSKVVTANHRALQIPEVYLREAPWPSAQSEIRTISAYKTPRDKVQCILRMCSTIMNLLSLANEDSVPGADDFVPVLVFVLIKANPPCLLSTVQYISSFYASCLSGEESYWWMQFTAAVEFIKTIDDRK

SEQ ID NO: 1077 - protein, 256 aa, Homo sapiens
WPMSLARGHGDTAASTAAPLSEEGEVTSGLQALAVEDTGGPSASAGKAEDEGEGGREETEREGSGGEEAQGEVPSAGGEEPAEEDSEDWCVPCSDEEVELPADGQPWMPPPSEIQRLYELLAAHGTLELQAEILPRRPPTPEAQSEEERSDEEPEAKEEEEEKPHMPTEFDFDDEPVTPKDSLIDRRRTPGSSARSQKREARLDKVLSDMKRHKKLEEQILRTGRDLFSLDSEDPSPASPPLRSSGSSLFPRQRKY

SEQ ID NO: 1078 - protein, 590 aa, Homo sapiens
  misc_feature (1)...(590): Xaa = any amino acid or other as shown in Table 3
LGRGTFGQVVXCWKRGTNEIVAIKILKNHPSYARQGQIEVSILARLSTESADDYNFVRAYECFQHKNHTCLVFEMLEQNLYDFLKQNKFSPLPLKYIRPVLQQVATALMKLKSLGLIHADLKPENIMLVDPSRQPYRVKVIDFGSASHVSKAVCSTYLQSRYYRAPEIILGLPFCEAIDMWSLGCVIAELFLGWPLYPGASEYDQIRYISQTQGLPAEYLLSAGTKTTRFFNRDTDSPYPLWRLKTPDDHEAETGIKSKEARKYIFNCLDDMAQVNMTTDLEGSDMLVEKAVRREFIDLLKKMLSIDSVKRFSPVGSLNHPFVTMSLFLDFPHSTHVKSCFQNMEICKRRVNMYDTVNQSKTPFITHVAPSTSTNLTMTFNNQLTTVHNQPSAASMAAVAQRSMPLQTGTAQICARPDPFQQALIVCPPGFQGLQASPSKHAGYSVRMENAVPIVTQAPGAQPLQIQPGLLAQQAWPSGTQQILLPPAWQQLTGVATHTSVQHAAVIPETMAGTQQLADWRNTHAHGSHYNPIMQQPALLTGHVTLPAAQPLNVGVAHVMRQQPTSTTSSRKSKQHLYCGRARVSKIASR

SEQ ID NO: 1079 - protein, 904 aa, Homo sapiens
  misc_feature (1)...(904): Xaa = any amino acid or other as shown in Table 3
EFAICRYPLGMSGGQIPDEDITASSQWSESTAAKYGRLDSEEGDGAWCPEIPVEPDDLKEFLQIDLHTLHFITLVGTQGRHAGGHGIEFAPMYKINYSRDGTRWISWRNRHGKQVLDGNSNPYDIFLKDLEPPIVARFVRFIPVTDHSMNVCMRVELYGCVWLDGLVSYNAPAGQQFVLPGGSIIYLNDSVYDGAVGYSMTEGLGQLTDGVSGLDDFTQTHEYHVWPGYDYVGWRNESATNGYIEIMFEFDRIRNFTTMKVHCNNMFAKGVKIFKEVQCYFRSEASEWEPNAISFPLVLDDVNPSARFVTVPLHHRMASAIKCQYHFADTWMMFSEITFQSDAAMYNNSEALPTSPMAPTTYDPMLKVDDSNTRILIGCLVAIIFILLAIIVIILWRQFWQKMLEKASRRMLDDEMTVSLSLPSDSSMFNNNRSSSPSEQGSNSTYDRIFPLRPDYQEPSRLIRKLPEFAPGEEESGCSGVVKPVQPSGPEGVPHYAEADIVNLQGVTGGNTYSVPAVTMDLLSGKRCGCGREFPPGKLLTFKEKLGEGQFGEVHLCEVEGMEKFKDKDFALDVSANQPVLVAVKMLRADANKNARNDFLKEIKIMSRLKDPNIIHLLSVCITDDPLCMITEYMENGDLNQFLSRHEPPNSSSSDVRTVSYTNLKFMATQIASGMKYLSSLNFVHRDLATRNCLVGKNYTIKIADFGMSRNLYSGDYYRIQGRAVLPIRWMSWESILLGKFTTASDVWAFGVTLWETFTFCQRKGPYSQLSDETGYXRNTGEFFPRPKGGQTYLPSTSPFVPDSCVIKLMLSCWRRDTKNRPSFQEIHLLLLQQGDERCCQCLAMFLRLRSSLQDLPLTHAYATPSGHLMKLRDRGLFALPSFPGHPHSLPLTHIYFFFFTLKN

SEQ ID NO: 1080 - protein, 304 aa, Homo sapiens
CSASPLRPGLLAPDLLYLPGAGQPRRPEAEPGQKPVVPTLYVTEAEAHSPALPGLSGPQPKWVEVEETIEVRVKKMGPQGVSPTTEVPRSSSGHLFTLPGATPGGDPNSNNSNNKLLAQEAWAQGTAMVGVREPLVFRVDARGSVDWAASGMGSLEEEGTMEEAGEEEGEDGDAFVTEESQDTHSLGDRDPKILTHNGRMLTLADLEDYVPGEGETFHCGGPGPGAPDDPPCEVSVIQREIGEPTVGSLCCSAWGMHWVPEALSASLGLSPMGRHHRDPRSVALRAPPSSCGRPRLGLWAVLPG

SEQ ID NO: 1081 - protein, 139 aa, Homo sapiens
QGLAAEFLQVPAVTRAYTAACVLTTAAVQLELLSPFQLYFNPHLVFRKFQAPFLPWALMGFSLLLGNSILVDLLGIAVGHIYYFLEDVFPNQPGGKRLLQTPGFLGLQSSKAPAGSSLTIWTQQSQGGPGTAGELAAPS

SEQ ID NO: 1082 - protein, 1105 aa, Homo sapiens
  misc_feature (1)...(1105): Xaa = any amino acid or other as shown in Table 3
EKNALEPTVYFGMGVXAPQVPRFQQRITGYQYYLQLRKDIWEEGIPCTLEQPIHLAGLAVQAIFGDFDQYESQDFLQKFALFPVGWLQDEKVLEEATQKVALLHQKYRGLTAPDAEMLYMQEVERMDGYGEESYPAKDSQGSDISIGACLEGIFVKHKNGRHPVVFRWHDIANMSHNKSFFALELANKEETIQFQTEDMETAKYIWRLCVARHKFYRLNQCNLQTQTVTVNPIRRRSSSRMSLPKPQPYVMPPPPQLHYNGHYTEPYASSQDNLFVPNQEGYYGQFQTSLNRAQIDFNGRIRNASVYSAHSTNSLNNPQPYLQPSPMSSNPSITGSDVMRPDYLPSHRHSAVIPPSYRPTPDYETVMKQLNRGLVHAERQSHSLRNLNIGSSYAYSRPAALVYSQPEIREHAQLPSPAAAHCPFSLSYSFHSPSPYPYPAERRPVVGAVSVPELTNAQLQAQDYPSPNIMRTQVYRPPPPYPPPRPANSTPDLSRHLYISSSNPDLITRRVHHSVQTFQEDSLPVAHSLQEVSEPLTAARHAQLHKRNSIEVAGLSHGLEGLRLKERTLSASAAEVAPRAVSVGSQPSVFTERTQREGPEEAEGLRYGHKKSLSDATMLIHSSEEEEDEDFEEESGARAPPARAREPRPGLAQDPPGCPRVLLAGPLHILEPKAHVPDAEKRMMDSSPVRTTAEAQRPWRDGLLMPSMSESDLTTSGRYRARRDSLKKRPVSDLLSGKKNIVEGLPPLGGMKKTRVDAKKIGPLKLAALNGLSLSRVPLPDEGKEVATRATNDERCKILEQRLEQGMVFTEYERILKKRLVDGECSTARLPENAERNRFQDVLPYDDVRVELVPTKENNTGYINASHIKVSVSGIEWDYIATQGPLQNTCQDFWQMVWEQGIAIIAMVTAEEEGGREKSFRYWPRLGSRHNTVTYGRFKITTRFRTDSGCYATTGLKMKHLLTGQERTVWHLQYTDWPEHGCPEDLKGFLSYLEEIQSVRRHTNSTSDPQSPNPPLLVHCSAGVGRTGVVILSEIMIACLEHNEVLDIPRVLDMLRQQRMMLVQTLCQYTFVYRVLIQVPEKAPRLILSSPQFPYGAQSCEAFTA

SEQ ID NO: 1083 - protein, 99 aa, Homo sapiens
  misc_feature (1)...(99): Xaa = any amino acid or other as shown in Table 3
RKKQKLAEEXVELSKLADLKDAEAVQKFFLEEIXLGEEILAKGVDHLTNPSAVCGQPQWLLQVLQQTLPLPVIQMLLTKPLPVNQRLVSAGSLAKDDVE

SEQ ID NO: 1084 - protein, 206 aa, Homo sapiens
  misc_feature (1)...(206): Xaa = any amino acid or other as shown in Table 3
SFCLHEFGWLGSSPQSDHPVPALLGLGAFVHHSLLQVHSSPGAGPVSFLFLGESCSPVDEPRCVPSCAFGFLSCFPLLNSAALERGLFFFVVFFFLESGSCQVARAGVRDRDRGSLQPPPPGLKQFCLSLPSRWDHRHPPPLRVPXFVFVFLVELGFHHVAQAGLKLLTLSDPPAPASHSAGITGVSQRDQPVLFLRWASCSELVG

SEQ ID NO: 1085 - protein, 99 aa, Homo sapiens
EGFPGRSLSGGLCCRLRRRFPIDGYRPRRRRRWSCCPSGVRPVRRMSQKSWIESTLTKRECVYIIPSSKDPHRCLPGCQICQQLVRRGFTVLARMVSIS

SEQ ID NO: 1086 - protein, 53 aa, Homo sapiens
QNSTCLTAQTHSLLQHQPLQLTTLLDQYIREQREKDSVMSANGKPDPDTVPDS

SEQ ID NO: 1087 - protein, 250 aa, Homo sapiens
LNPWKNALQDFCLPFLRITSLLQHHLFGEDLPSCQEEEEFSVLASCLGLLPTFYQTEHPFISASCLDWPVPAFDIITHWCFEIKSFTERHAEQGKALLIQESKWKLPHLLQLPENYNTIFQYYHRKTCSVCTKVPKDPAVCLVCGTFVCLKGLCCKQQSYCECVLHSQNCGAGTGIFLLINASVIIIIRGHRFCLWGSVYLDAHGEEDRDLRRGKPLYICKERYKVLEQQWISHTFDHINKRWGPHYNGL

SEQ ID NO: 1088 - protein, 455 aa, Homo sapiens
KGQLVNLLPPENFPWCGGSQGPRMLRTCYVLCSQAGPRSRGWQSLSFDGGAFHLKGTGELTRALLVLRLCAWPPLVTHGLLLQAWSRRLLGSRLSGAFLRASVYGQFVAGETAEEVKGCVQQLRTLSLRPLLAVPTEEEPDSAAKSGEAWYEGNLGAMLRCVDLSRGLLEPPSLAEASLMQLKVTALTSTRLCKELASWVRRPGASLELSPERLAEAMDSGQNLQVSCLNAEQNQHLRASLSRLHRVAQYARAQHVRLLVDAEYTSLNPALSLLVAALAVRWNSPGEGGPWVWNTYQACLKDTFERLGRDAEAAHRAGLAFGVKLVRGAYLDKERAVAQLHGMEDPPTQADYEATSQSYSRCLELMLTHVARHGPMCHLMVASHNEESVRQATKGQAGYVVYKSIPYGSLEEVIPYLIRRAQENRSVLQGARREQELLSQKLWRRLLPGCRRIPH

SEQ ID NO: 1089 - protein, 243 aa, Homo sapiens
  misc_feature (1)...(243): Xaa = any amino acid or other as shown in Table 3
VVEFGEMSTARAPEGLRWFQLYVHPDLQLNKQLIQRVESLGFKALVITLDTPVCGNRRHDIRNQLRRNLTLTDLQSPKKGNAIPYFQMTPISTSLCWNDLSWFQSITRLPIILKGILTKEDAELAVKHNVQGIIVSNHGGRQLDEVLASIDALTEVGAAEXGNMKYYLDAGVRTGNDVQKALALGAKCIFLGRPILWGLACKGEHGVKEVLNILTNEFHTSMALTGCRSVAEINRNLVQFSRL

SEQ ID NO: 1090 - protein, 90 aa, Homo sapiens
  misc_feature (1)...(90): Xaa = any amino acid or other as shown in Table 3
FFLRWSFTLLPRLECQWLNLGSLQPPPPGFKXSSCLRLLSSWGLQVPTSMLGXFFCIFSREGISPCWPGWSQTPKVIHLPRPPRVLRLQA

SEQ ID NO: 1091 - protein, 259 aa, Homo sapiens
  misc_feature (1)...(259): Xaa = any amino acid or other as shown in Table 3
LLCFVHTALQSFQGELYEPHVVIAIVVFLVKLGICKXRASWRKKVTLVVKXSLKICFTKYGSCYHPGEKSSSWLFNXRMVNDCLATSCSNRSFVIQQIPSSNLFMVVVDSSCLCESVAPITMAPIEIRYILLCAGPLTTTETSKGYQWXGNLGEKYXRRKITSFPLLERESSXESCHCQILTSEMQSRKKQSLETCLNYSQHNESLKCERLKAQKIRRRPESCHGFHPEENARECGGAPSLQAQTVLLLLPLLLMLFSR

SEQ ID NO: 1092 - protein, 117 aa, Homo sapiens
  misc_feature (1)...(117): Xaa = any amino acid or other as shown in Table 3
VPSPTHDPKPAEAPMPAXPAPPGPASPGGALEPPAAARAGGSPTAVRSILTKERRPEGGYKAVWFGEDIGTEADVVVLNAPTLDVDGASDSGSGDEGEGAGRGGGPYDAPGGDDSYI

SEQ ID NO: 1093 - protein, 763 aa, Homo sapiens
LISLAGPTDDIQSTGPQVHALNILRALFRDTRLGENIIPYVADGAKAAILGFTSPVWAVRNSSTLLFSALITRIFGVKRAKDEHSKTNRMTGREFFSRFPELYPFLLKQLETVANTVDSDMGEPNRHPSMFLLLLVLERLYASPMDGTSSALSMGPFVPFIMRCGHSPVYHSREMAARALVPFVMIDHIPNTIRTLLSTLPSCTDQCFRQNHIHGTLLQVFHLVQAYSDSKHGTNSDFQHELTDITVCTKAKLWLAKRQNPCLVTRAVYIDILFLLTCCLNRSAKDNQPVLESLGFWEEVRGIISGSELITGFPWAFKVPGLPQYLQSLTRLAIAAVWAAAAKSGERETNVPISFSQLLESAFPEVRSLTLEALLEKFLAAASGLGEKGVPPLLCNMGEKFLLLAMKENHPECFCKILKILHCMDPGEWLPQTEHCVHLTPKEFLIWTMDIASNERSEIQSVALRLASKVISHHMQTCVENRELIAAELKQWVQLVILSCEDHLPTESRLAVVEVLTSTTPLFLTNPHPILELQDTLALWKCVLTLLQSEEQAVRDAATETVTTAMSQENTCQSTEFAFCQVDASIALALALAVLCDLLQQWDQLAPGLPILLGWLLGESDDLVACVESMHQVEEDYLFEKAEVNFWAETLIFVKYLCKHLFCLLSKSGWRPPSPEMLCHLQRMVSEQCHLLSQFFRELPPAAEFVKTVEFTRLRIQEERTLACLRLLAFLEGKEGEDTLVLSVWDSYAESRQLTLPRTEAAC

SEQ ID NO: 1094 - protein, 413 aa, Homo sapiens
HAFRPIALQRGVSFRGCSNQYAESRRLQGESGSRAFAHLMESLLQHLDRFSELLAVSSTTYVSTWDPATVRRALQWARYLRHIHRRFGRHGPIRTALERRLHNQWRQEGGFGRGPVPGLANFQALGHCDVLLSLRLLENRALGDAARYHLVQQLFPGPGVRDADEETLQESLARLARRRSAVHMLRFNGYRENPNLQEDSLMKTQAELLLERLQEVGKAEAERPARFLSSLWERLPQNNFLKVIAVALLQPPLSRRPQEELEPGIHKSPGEGSQVLVHWLLGNSEVFAAFCRALPAGLLTLVTSRHPALSPVYLGLLTDWGQRLHYDLQKGIWVGTESQDVPWEELHNRFQSLCQAPPPLKDKVLTALETCKAQDGDFEEPGLSIWTDLLLALRSGAFRKRQVLGLSAGLSSV

SEQ ID NO: 1095 - protein, 344 aa, Homo sapiens
  misc_feature (1)...(344): Xaa = any amino acid or other as shown in Table 3
SHLIQHQRIHTXEXAHECNECGKAFSQTSCLIQHHKMHRKEKSYECNEYEGSFSHSSDLILQQEVLTRQKAFDCDVWEKNSSQRAHLVQHQSIHTKEKPHECNEDGKIFNQIQALIQHLRVHTREKYVCTACGKAFSHSSAIAQHQIIHTREKPSECDEXRKGISVKLLIDSCRIYTSEKSYKCIECGKFFMLLVFSYLSHIWRIHMGIKFHCCNECEKAISQRNYLVXYQIHAMQKDYKCNEACMCVRRFSHNPTLIQHQRIYTXENLFGCSKCGRSFNRSLTSLCHIRISIRRQEFDVTQMEKLDTTFQASTQHRNNGEKIVDYLFMKLLIHSPNLFHCTKI

SEQ ID NO: 1096 - protein, 76 aa, Homo sapiens
AVTLTAKICSFTPEPSETMSPPAGTNNSRHAALRAVTLPVKVCSFTPEPARSRTHQKEETPNTSEHQKEQTPEAPP

SEQ ID NO: 1097 - protein, 1462 aa, Homo sapiens
  misc_feature (1)...(1462): Xaa = any amino acid or other as shown in Table 3
MAYSWQTDPNPNESHEKQYEHQEFLFVNQPHSSSQVSLGFDQIVDEISGKIPHYESEIDENTFFVPTAPKWDSTGHSLNEAHQISLNEFTSKSRELSWHQVSKAPAIGFSPSVLPKPQNTNKECSWGSPIGKHHGADDSRFSILAPSFTSLDKINLEKELENENHNYHIGFESSIPPTNSSFSSDFMPKEENKRSGHVNIVEPSLMLLKGSLQPGMWESTWQKNIESIGCSIQLVEVPQSSNTSLASFCNKVKKIRERYHAADVNFNSGKIWSTTTAFPYQLFSKTKFNIHIFIDNSTQPLHFMPCANYLVKDLIAEILHFCTNDQLLPKDHILSVWGSEEFLQNDHCLGSHKMFQKDKSVIQLHLQKSREAPGKLSRKHEEDHSQFYLNQLLEFMHIWKVSRQCLLTLIRKYDFHLKYLLKTQENVYNIIEEVKKICSVLGCVETKQITDAVNELSLILQRKGENFYQSSETSAKGLIEKVTTELSTSIYQLINVYCNSFYADFQPVNVPRCTSYLNPGLPSHLSFTVYAAHNIPETWVHRINFPLEIKSLPRESMLTVKLFGIACATNNANLLAWTCLPLFPKEKSILGSMLFSMTLQSEPPVEMITPGVWDVSQPSPVTLQIDFPATGWEYMKPDSEENRSNLEEPLKECIKHIARLSQKQTPLLLSEEKKRYLWFYRFYCNNENCSLPLVLGSAPGWDERTVSEMHTILRRWTFSQPLEALGLLTSSFPDQEIRKVAVQQLDNLLNDELLEYLPQLVQAVKFEWNLESPLVQLLLHRSLQSIQVAHRLYWLLKNAENEAYFKSWYQKLLAALQFCAGKALNDEFSKEQKLIKILGDIGERVKSASDHQRQEVLKKEIGRLEEFFQDVNTCHLPLNPALCIKGIDHDACSYFTSNALPLKITFINANLMGKNISIIFKAGDDLRQDMLVLQLIQVMDNIWLQEGLDMQMIIYRCLSTGKDQRLVQMVPDAVTLAKIHRHSGLIGPLKENTIKKWFSQHNHLKADYEKALRNFFYSCAGWCVVTFILGVCDRHNDNIMLTKSGHMFHIDFGKFLGHAQTFGGIKRDRAPFIFTSEMEYFITEGGKNPQHFQDFVELCCRAYNIIRKHSQLLLNLLEMMLYAGLPELSGIQDLKYVYNNLRPQDTDLEATSHFTKKIKESLECFPVKLNNLIHTLAQMSAISPAKSTSQTFPQESCLLSTTRSIERATILGFSKKSSNLYLIQVTHSNNETSLTEKSFEQFSKLHSQLQKQFASLTLPEFPHWWHLPFTNSDHRRFRDLNHYMEQILNVSHEVTNSDCVLSFFLSEAGQQTVEESSPVYLGEKFPDKKPKVQLVISYEDVKLTILVKHMKNIHLPDGSAPSAHVEFYLLPYPSEVRRRKTKSVPKCTDPTYNEIVVYDEVTELQGHVLMLIVKSKTVFVGAINIRLCSVPLDKEKWYPLGNSIIXPLLLFYTSNFMQSVLH

SEQ ID NO: 1098 - protein, 111 aa, Homo sapiens
  misc_feature (1)...(111): Xaa = any amino acid or other as shown in Table 3
FFLRWSLDSVTQAGVQSHDLSSLQPPPPGFKQSSLFGLPSSWEXRWVPPCPANFFVFLVETGFRHVGQAGLELLTSNDLPVSACQSAGITGVTTVPQRKSMILYEVTICYP

SEQ ID NO: 1099 - protein, 1070 aa, Homo sapiens
  misc_feature (1)...(1070): Xaa = any amino acid or other as shown in Table 3
FVREIRGPAVPRLTSAEDRHRHGPHAHSPELQRTGRDYSLDYLPFRLWVGIWVATFCLVLVATEASVLVRYFTRFTEEGFCALISLIFIYDAVGKMLNLTHTYPIQKPGSSAYGCLCQYPGPGGNESQWIRTRPKDRDDIVSMDLGLINASLLPPPECTRQGGHPRGPGCHTVPDIAFFSLLLFLTSFFFAMALKCVKTSRFFPSVVRKGLSDFSSVLAILLGCGLDAFLGLATPKLMVPREFKPTLPGRGWLVSPFGANPWWWSVAAALPALLLSILIFMDQQITAVILNRMEYRLQKGAGFHLDLFWVAVLMLLTSALGLPWYVSATVISLAHMDSLRRESRACAPGERPNFLGIREQRLTGLVVFILTGASIFLAPVLKFIPMPVLYGIFLYMGVAALSSIQFTNRVKLLLMPAKHQPDLLLLRHVPLTRVHLFTAISFACLGLLWIIKSTPAAIIFPLMLLGLVGVRKALERVFSPQELLWLDELMPEEERSIPEKGLEPEHSFSGSDSEDSELMYQPKAPEINISVNXLEXEFVREIRGPAVPRLTSAEDRHRHGPHAHSPELQRTGRDYSLDYLPFRLWVGIWVATFCLVLVATEASVLVRYFTRFTEEGFCALISLIFIYDAVGKMLNLTHTYPIQKPGSSAYGCLCQYPGPGGNESQWIRTRPKDRDDIVSMDLGLINASLLPPPECTRQGGHPRGPGCHTVPDIAFFSLLLFLTSFFFAMALKCVKTSRFFPSVVRKGLSDFSSVLAILLGCGLDAFLGLATPKLMVPREFKPTLPGRGWLVSPFGANPWWWSVAAALPALLLSILIFMDQQITAVILNRMEYRLQKGAGFHLDLFCVAVLMLLTSALGLPWYVSATVISLAHMDSLRRESRACAPGERPNFLGIREQRLTGLVVFILTGASIFLAPVLKFIPMPVLYGIFLYMGVAALSSIQFTNRVKLLLDASKTPARPATLAACASDQGPPLHSHQLCPVWGCFGIIKSTPAAIIFPLMLLGLVGVRKALERVFSPQELLWLDELMPEEERSIPEKGLEPEHSFSGSDSEDSELMYQPKAPEINISVN

SEQ ID NO: 1100 - protein, 875 aa, Homo sapiens
  misc_feature (1)...(875): Xaa = any amino acid or other as shown in Table 3
MGLKARRAAGAAGGGGDGGGGGGGAANPAGGDAAAAGDEERKVGLAPGDVEQVTLALGAGADKDGTLLLEGGGRDEGQRRTPQGIGLLAKTPLSRPVKRNNAKYRRIQTLIYDALERPRGWALLYHALVFLIVLGCLILAVLTTFKEYETVSGDWLLLLETFAIFIFGAEFALRIWAAGCCCRYKGWRGRLKFARKPLCMLDIFVLIASVPVVAVGNQGNVLATSLRSLRFLQILRMLRDGPGEGGTWKLLGSAICAHSKELITAWYIGFLTLILSSFLVYLVEKDVPEVDAQGEEMKEEFETYADALWWGLITLATIGYGDKTPKTWEGRLIAATFSLIGVSFFALPAGILGSGLALKVQEQHRQKHFEKRRKPAAELIQAAWRYYATNPNRIDLVATWRFYESVVSFPFFRKEQLEAASSQKLGLLDRVRLSNPRGSNTKGKLFTPLNVDAIEESPSKEPKPVGLNNKERFRTAFRMKAYAFWQSSEDAGTGDPMAEDRGYGNDFPIEDMIPTLKAAIRAVRILQFRLYKKKFKETLRPYDVKDVIEQYSAGHLDMLSRIKYLQTRIDMIFTPGPPSTPKHKKSQKGSAFTFPSQQSPRNEPYVARPSTSEIEDQRHXWGKFVKSLKGQVQGLGRKLDFLVDMHMQHMERLQVQVTEYYPTKGTSSPAEAEKKEDNRYSDLKTIICNYSETGPPEPPYSFHQVTIDKVSPYGFFAHDPVNLPRGGPSSGKVQATPPSSATTYVERPTVLPILTLLDSRVSCHSQADLQGPYSDRISPRQRRSITRDSDTPLSLMSVNHEELERSPSGFSISQDRDDYVFGPNGGSSWMREKRYLAEGETDTDTDPFTPSGSMPLSSTGDGISDSVWTPSNKPI

SEQ ID NO: 1101 - protein, 3530 aa, Homo sapiens
  misc_feature (1)...(3530): Xaa = any amino acid or other as shown in Table 3
RTRGIIEFDPKYTAFEVEEDVGLIMIPVVRLHGTYGYVTADFISQSSSASPGGVDYILHGSTVTFQHGQNLSFINISIIDDNESEFEEPIEILLTGATGGAVLGRHLVSRIIIAKSDSPFGVIRFLNQSKISIANPNSTMILSLVLERTGGLLGEIQVNWETVGPNSQEALLPQNRDIADPVSGLFYFGEGEGGVRTIILTIYPHEEIEVEETFIIKLHLVKGEAKLDSRAKDVTLTIQEFGDPNGVVQFAPETLSKKTYSEPLALEGPLLITFFVRRVKGTFGEIMVYWELSSEFDITEDFLSTSGFFTIADGESEASFDVHLLPDEVPEIEEDYVIQLVSVEGGAELDLEKSITWFSVYANDDPHGVFALYSDRQSILIGQNLIRSIQINITRLAGTFGDVAVGLRISSDHKEQPIVTENAERQLVVKDGATYKVDVVPIKNQVFLSLGSNFTLQLVTVMLVGGRFYGMPTILQEAKSAVLPVSEKAANSQVGFESTAFQLMNITAGTSHVMISRRGTYGALSVAWTTGYAPGLEIPEFIVVGNMTPTLGSLSFSHGEQRKGVFLWTFPSPGWPEAFVLHLSGVQSSAPGGAQLRSGFIVAEIEPMGVFQFSTSSRNIIVSEDTQMIRLHVQRLFGFHSDLIKVSYQTTAGSAKPLEDFEPVQNGELFFQKFQTEVDFEITIINDQLSEIEEFFYINLTSVEIRGLQKFDVNWSPRLNLDFSVAVITILDNDDLAGMDISFPETTVAVAVDTTLIPVETESTTYLSTSKTTTILQPTNVVAIVTEATGVSAIPEKLVTLHGTPAVSEKPDVATVTANVSIHGTFSLGPSIVYIEEEMKNGTFNTAEVLIRRTGGFTGNVSITVKTFGERCAQMEPNALPFRGIYGISNLTWAVEEEDFEEQTLTLIFLDGERERKVSVQILDDDEPEGQEFFYVFLTNPQGGAQIVEGKDDTGFAAFAMVIITGSDLHNGIIGFSEESQSGLELREGAVMRRLHLIVTRQPNRAFEDVKVFWRVTLNKTVVVLQKDGVNLMEELQSVSGTTTCTMGQTKCFISIELKPEKVPQVEVYFFVELYEATAGAAINNSARFAQIKILESDESQSLVYFSVGSRLAVAHKKATLISLQVARDSGTGLMMSVNFSTQELRSAETIGRTIISPAISGKDFVITEGTLVFEPGQRSTVLDVILTPETGSLNSFPKRFQIVLFDPKGGARIDKVYGTANITLVSDADSQAIWGLADQLHQPVNDDILNRVLHTISMKVATENTDEQLSAMMHLIEKITTEGKIQAFSVASRTLFYEILCSLINPKRKDTRGFSHFAELTENFAFSLLTNVTCGSPGEKSKTILDSCPYLSILALHWYPQQINGHKFEGKEGDYIRIPERLLDVQDAEIMAGKSTCKLVQFTEYSSQQWFISGNNLPTLKNKVLSLSVKGQSSQLLTNDNEVLYRIYAAEPRIIPQTSLCLLWNQAAASWLSDSQFCKVIEETADYVECACLHMSVYAVYARTDNLSSYNEAFFTSGFICISGLCLAVLSHIFCARYSMFAAKLLTHMMAASLGTQILFLASAYASPQLAEESCSAMAAVTHYLYLCQFSWMLIQSVNFWYVLVMNDEHTERRYLLFFLLSWGLPAFVVILLIVILKGIYHQSMSQIYGLIHGDLCFIPNVYAALFTAALVPLTCLVVVFVVFIHAYQVKPQWKAYDDVFRGRTNAAEIPLILYLFALISVTWLWGGLHMAYRHFWMLVLFVIFNSLQLLYPLFYFLLLXDQSSSASPGGVDYILHGSTVTFQHGQNLSFINISIIDDNESEFEEPIEILLTGATGGAVLGRHLVSRIIIAKSDSPFGVIRFLNQSKISIANPNSTMILSLVLERTGGLLGEIQVNWETVGPNSQEALLPQNRDIADPVSGLFYFGEGEGGVRTIILTIYPHEEIEVEETFIIKLHLVKGEAKLDSRAKDVTLTIQEFGDPNGVVQFAPETLSKKTYSEPLALEGPLLITFFVRRVKGTFGEIMVYWELSSEFDITEDFLSTSGFFTIADGESEASFDVHLLPDEVPEIEEDYVIQLVSVEGGAELDLEKSITWFSVYANDDPHGVFALYSDRQSILIGQNLIRSIQINITRLAGTFGDVAVGLRISSDHKEQPIVTENAERQLVVKDGATYKVDVVPIKNQVFLSLGSNFTLQLVTVMLVGGRFYGMPTILQEAKSAVLPVSEKAANSQVGFESTAFQLMNITAGTSHVMISRRGTYGALSVAWTTGYAPGLEIPEFIVVGNMTPTLGSLSFSHGEQRKGVFLWTFPSPGWPEAFVLHLSGVQSSAPGGAQLRSGFIVAEIEPMGVFQFSTSSRNIIVSEDTQMIRLHVQRLFGFHSDLIKVSYQTTAGSAKPLEDFEPVQNGELFFQKFQTEVDFEITIINDQLSEIEEFFYINLTSVEIRGLQKFDVNWSPRLNLDFSVAVITILDNDDLAGMDISFPETTVAVAVDTTLIPVETESTTYLSTSKTTTILQPTNVVAIVTEATGVSAIPEKLVTLHGTPAVSEKPDVATVTANVSIHGTFSLGPSIVYIEEEMKNGTFNTAEVLIRRTGGFTGNVSITVKTFGERCAQMEPNALPFRGIYGISNLTWAVEEEDFEEQTLTLIFLDGERERKVSVQILDDDEPEGQEFFYVFLTNPQGGAQIVEGKDDTGFAAFAMVIITGSDLHNGIIGFSEESQSGLELREGAVMRRLHLIVTRQPNRAFEDVKVFWRVTLNKTVVVLQKDGVNLMEELQSVSGTTTCTMGQTKCFISIELKPEKVPQVEVYFFVELYEATAGAAINNSARFAQIKILESDESQSLVYFSVGSRLAVAHKKATLISLQVARDSGTGLMMSVNFSTQELRSAETIGRTIISPAISGKDFVITEGTLVFEPGQRSTVLDVILTPETGSLNSFPKRFQIVLFDPKGGARIDKVYGTANITLVSDADSQAIWGLADQLHQPVNDDILNRVLHTISMKVATENTDEQLSAMMHLIEKITTEGKIQAFSVASRTLFYEILCSLINPKRKDTRGFSHFAELTENFAFSLLTNVTCGSPGEKSKTILDSCPYLSILALHWYPQQINGHKFEGKEGDYIRIPERLLDVQDAEIMAGKSTCKLVQFTEYSSQQWFISGNNLPTLKNKVLSLSVKGQSSQLLTNDNEVLYRIYAAEPRIIPQTSLCLLWNQAAASWLSDSQFCKVIEETADYVECACLHMSVYAVYARTDNLSSYNEAFFTSGFICISGLCLAVLSHIFCARYSMFAAKLLTHMMAASLGTQILFLASAYASPQLAEESCSAMAAVTHYLYLCQFSWMLIQSVNFWYVLVMNDEHTERRYLLFFLLSWGLPAFVVILLIVILKGIYHQSMSQIYGLIHGDLCFIPNVYAALFTAALVPLTCLVVVFVVFIHAYQVKPQWKAYDDVFRGRTNAAEIPLILYLFALISVTWLWGGLHMAYRHFWMLVLFVIFNSLQLLVPSVLLFTSMRSTFFSFHTGTLTSREKKSTFVLTCLLSPDSKGLGVLCFLNTEWAFQVH

SEQ ID NO: 1102 - protein, 945 aa, Homo sapiens
  misc_feature (1)...(945): Xaa = any amino acid or other as shown in Table 3
AAGATMERDGCAGGGSRGGEGGRAPREGPAGNGRDRGRSHAAEAPGDPQAAASLLAPMDVGEEPLEKAARARTAKDPNTYKVLSLVLSVCVLTTILGCIFGLKPSCAKEVKSCKGRCFERTFGNCRCDAACVELGNCCLGLPGGTCIEPEHIWTCNKFRCGEKRLTRSLCACSDDCKDRGDCLPSNLQFLCVQGEKSWGRKNPCESHLMEPQCPAGFETPSLPLLIFSLDGFRAEYLHTWGGLLPVISKLKKCGTYTKNMRPVYPTKTFPNHYSIVTGLYPESHGIINNKMYDPKMNASFSLKSKEKFNPEWYKGEPIWVTAKYQGLKSGTFFWPGSDVEINGIFPDIYKMYNGSVPFEERILAVLQWLQLPKDERPHFYTLYLEEPDSSGHSYGPVSSEVIKALQRVDGMVGMLMDGLKELNLHRCLNLILISDHGMEQGSCKKYIYLNKYLGDVKNIKVIYGPAARLRPSDVPDKYYSFNYEGIARNLSCREPNQHFKPYLKHFLPKRLHFAKSDRIEPLTFYLDPQWQLALNPSERKYCGSGFHGSDNVFSNMQALFVGYGPGFKHGIEADTFENIEVYNLMCDLLNLTPAPNNGTHGSLNHLLKNPVYTPKHPKEVHPLVQCPFTRNPRDNLGCSCNPSILPIEDFQTQFNLTVAEEKIIKHETLPYGRPRVLQKENTICLLSQHQFMSGYSQDILMPLWTSYTVDRNDSFSTEDFSNCLYQDFRIPLSPVHKCSFYKNNTKVSYGFLSPPQLNKNSSGIYSEALLTTNIVPMYQSFQVIWRYFHDTLLRKYAEERNGVNVVSGPVFDFDYDGRCDSLENLRQKRRVHPVTQENFWIPNSTSFYVVLTSCKDTSQTPLHCENLDTLGFPFCLHRDWINSETCVHGKHDSSWVEEFVKCLHRARITGCXGTSLGLSFYQQRKEPVSDILKLKTHLPTFSQED

SEQ ID NO: 1103 - protein, 217 aa, Homo sapiens
TVPPPPGGPSPAPLHPKRSPTSTGEAELKEERLPGRKASCSTAGSGSRGLPPLSPMVSSAHNPNKAEIPERRKDSTSTPNNLPPSMMTRRNTYVCTERPGAERPSLLPNGKENSSGTPRVPPASPSSHSLAPPSGERSRLARGSTIRSTFHGGQVRDRRAGGWGWFFNKHALQRAPRNAGAPSLMPGHRTVLINYGGGQDLKNWETCLAAPPNKHRR

SEQ ID NO: 1104 - protein, 436 aa, Homo sapiens
HTLHHSSPTSEAEEFVSRLSTQNYFRSLPRGTSNMTYGTFNFLGGRLMIPNTGISLLIPPDAIPRGKIYEIYLTLHKPEDVRLPLAGCQTLLSPIVSCGPPGVLLTRPVILGMDHCGEPSPDSWSLRLKKQSCEGSWEDVLHLGEEAPSHLYYCQLEASACYVFTEQLSRYALVGEALSVAAAKRLKLLLFAPVACTSLEYNILVYCLHDTHDALNVVVQLEKQLQGQLIQEPLVLHFKDSYHNLRLSIHDVPSSLWKSKLLVSYQEIPFYHIWNGTQRYLHCTFTLERVSPSTSDLACKLWVWQVEGDGQSFSINFNITKDTRFAELLALESEAGVPALVGPSAFKIPFLIRQKIISSLDPPCRRGADWRTLAQKLHLDSHLSFFASKPSPTAMILNLWEARHFPNGNLSQLAAAVAGTGPAGRWLLSQCSEAEC

SEQ ID NO: 1105 - protein, 113 aa, Homo sapiens
GSAAGQVQQQQQRRHQQGKVTVKYDRKELRKRLVLEEWIVEQLGQLYGCEEEEMPEVEIDIDDLFDAYSDEQRASKLQEALVDCYKPTEEFIKELLSRIRGMRKLSPPQKKSV

SEQ ID NO: 1106 - protein, 464 aa, Homo sapiens
IMLDGRVRWLTPVISALWEAEMEDVIARMQDEKNGIPIRTVKSFLSKIPSVFSGSDIVQWLIKNLTIEDPVEALHLGTLMAAHGYFFPISDHVLTLKDDGTFYRFQTPYFWPSNCWEPENTDYAVYLCKRTMQNKARLELADYEAESLARLQRAFARKWEFIFMQAEAQAKVDKKRDKIERKILDSQERAFWDVHRPVPGCVNTTEVDIKKSSRMRNPHKTRKSVYGLQNDIRSHSPTHTPTPETKPPTEDELQQQIKYWQIQLDRHRLKMSKVADSLLSYTEQYLEYDPFLLPPDPSNPWLSDDTTFWELEASKEPSQQRVKRWGFGMDEALKDPVGREQFLKFLESEFSSENLRFWLAVEDLKKRPIKEVPSRVQEIWQEFLAPGAPSAINLDSKSYDKTTQNVKEPGRYTFEDAQEHIYKLMKSDSYPRFIRSSAYQELLQAKKKGKSLTSKRLTSLAQSY

SEQ ID NO: 1107 - protein, 153 aa, Homo sapiens
GTRDYPRIVNHLDHTYVTAPQAFMMFQYFVKVVPTVYMKVDGEVLTTNQIYVTRHEKAAYVLMGDQGLPGVFILYELSPMMVNLTEIHTFFSLFLTIVGATIGGMFFEHFVINYLTHKWGLGFYFKNENSLQGGHRTLYGVNFFMYWSLRGGS

SEQ ID NO: 1108 - protein, 506 aa, Homo sapiens
SVWWNSQRQFVVRAWGCAGPCGRAVFLAFGLGLGLIEEKQAESRRAVSACQEIQAIFTQKSKPGPDPLDTRRLQGFRLEEYLIGQSIGKGCSAAVYEATMPTLPQNLEVTKSTGLLPGRGPGTSAPGEGQERAPGAPAFPLAIKMMWNISAGSSSEAILNTMSQELVPASRVALAGEYGAVTYRKSKRGPKQLAPHPNIIRVLRAFTSSVPLLPGALVDYPDVLPSRLHPEGLGHGRTLFLVMKNYPCTLRQYLCVNTPSPRLAAMMLLQLLEGVDHLVQQGIAHRDLKSDNILVELDPDGCPWLVIADFGCCLADESIGLQLPFSSWYVDRGGNGCLMAPEVSTARPGPRAVIDYSKADAWAVGAIAYEIFGLVNPFYGQGKAHLESRSYQEAQLPALPESVPPDVRQLVRALLQREASKRPSARVAANVLHLSLWGEHILALKNLKLDKMVGWLLQQSAATLLANRLTEKCCVETKMKMLFLANLECETLCQAALLLCSWRAAL

SEQ ID NO: 1109 - protein, 382 aa, Homo sapiens
RPLLRLAELPDHCYRMNSSPAGTPSPQPSRANGNINLGPSANPNAQPTDFDFLKVIGKGNYGKVLLAKRKSDGAFYAVKVLQKKSILKKKEQSHIMAERSVLLKNVRHPFLVGLRYSFQTPEKLYFVLDYVNGGELFFHLQRERRFLEPRARFYAAEVASAIGYLHSLNIIYRDLKPENILLDCQGHVVLTDFGLCKEGVEPEDTTSTFCGTPEYLAPEVLRKEPYDRAVDWWCLGAVLYEMLHGLPPFYSQDVSQMYENILHQPLQIPGGRTVAACDLLQSLLHKDQRQRLGSKADFLEIKNHVFFSPINWDDLYHKRLTPPFNPNVTGPADLKHFDPEFTQEAVSKSIGCTPDTVASSSGASSAFLGFSYAPEDDDILDC

SEQ ID NO: 1110 - protein, 535 aa, Homo sapiens
RPQTLKGHQEKIRQRQSILPPPQGPAPIPFQHRGGDSPEAKNRVGPQVPLSEPGFRRRESQEEPRAVLAQKIEKETQILNCALDDIEWFVARLQKAAEAFKQLNQRKKGKKKGKKAPAEGVLTLRARPPSEGEFIDCFQKIKLAINLLAKLQKHIQNPSAAELVHFLFGPLDLIVNTCSGPDIARSVSCPLLSRDAVDFLRGHLVPKEMSLWESLGESWMRPRSEWPREPQVPLYVPKFHSGWEPPVDVLQEAPWEVEGLASAPIEEVSPVSRQSIRNSQKHSPTSEPTPPGDALPPVSSPHTHRGYQPTPAMAKYVKILYDFTARNANELSVLKDEVLEVLEDGRQWWKLRSRSGQAGYVPCNILGEARPEDAGAPFEQAGQKYWGPASPTHKLPPSFPGNKDELMQHMDEVNDELIRKISNIRAQPQRHFRVERSQPVSQPLTYESGPDEVRAWLEAKAFSPRIVENLGILTGPQLFSLNKEELKKVCGEEGVRVYSQLTMQKAFLEKQQSGSELEELMNKFHSMNQRRGEDS

SEQ ID NO: 1111 - protein, 346 aa, Homo sapiens
  misc_feature (1)...(346): Xaa = any amino acid or other as shown in Table 3
AWHEGLVSSPAIGAYLSASYGDSLVVLVATVVALLDICFILVAVPESLPEKMRPVSWGAQISWKQADPFASLKKVGKDSTVLLICITVCLSYLPEAGQYSSFFLYLRQVIGFGSVKIAAFIAMVGILSIVAQTAFLSILMRSLGNKNTVLLGLGFQMLQLAWYGFGSQAWMMWAAGTVAAMSSITFPAISALVSRNAESDQQGVAQGIITGIRGLCNGLGPALYGFIFYMFHVELTELGPKLNSNNVPLQGAVIPGPPFLFGACIVLMSFLAALFIPEYSKASGVQKHSNSSSGSLTNTPERGSDEDIEPLLQDSSIWELSSFEEPGNQCTELXTRQKVGFCIRHL

SEQ ID NO: 1112 - protein, 647 aa, Homo sapiens
MAAGLATWLPFARAAAVGWLPLAQQPLPPAPGVKASRGDEVLVVNVSGRRFETWKNTLDRYPDTLLGSSEKEFFYDADSGEYFFDRDPDMFRHVLNFYRTGRLHCPRQECIQAFDEELAFYGLVPELVGDCCLEEYRDRKKENAERLAEDEEAEQAGDGPALPAGSSLRQRLWRAFENPHTSTAALVFYYVTGFFIAVSVIANVVETIPCRGSARRSSREQPCGERFPQAFFCMDTACVLIFTGEYLLRLFAAPSRCRFLRSVMSLIDVVAILPYYIGLLVPKNDDVSGAFVTLRVFRVFRIFKFSRHSQGLRILGYTLKSCASELGFLLFSLTMAIIIFATVMFYAEKGTNKTNFTSIPAAFWYTIVTMTTLGYGDMVPSTIAGKIFGSICSLSGVLVIALPVPVIVSNFSRIYHQNQRADKRRAQQKVRLARIRLAKSGTTNAFLQYKQNGGLEDSGSGEEQAVCVRNRSAFEQQHHHLLHCLEKTTCHEFTDELTFSEALGAVSPGGRTSRSTSVSSQPVGPGSLLSSCCPRRAKRRAIRLANSTASVSRGSMQELDMLAGLRRSHAPQSRSSLNAKPHDSLDLNCDSGDFVAAIISIPTPPANTPDESQPSSPGGGGRAGSTLRNSSLGTPCLFPETVKISSL

SEQ ID NO: 1113 - protein, 220 aa, Homo sapiens
  misc_feature (1)...(220): Xaa = any amino acid or other as shown in Table 3
GWGKPFKDWTTGGQDTGGEPALLVGAGEGRAPRLNCPSGQIRSPGPGDLSIYDNWIRYFNRSSPVYGLVPRSKTSARIYPTYHTAFDTFDYVDKFLDPGEEGDKGHPETRTGEAEDXALALSPCRRFSSHQAVARTAGSVILRLSDSFFLPLKVSDYSETLRSFLQAAQQDLGALLEQHSISLGPLVTAVEKFEAEAAALGQRISTLQKGSPDPLQVRML

SEQ ID NO: 1114 - protein, 382 aa, Homo sapiens
GIRGGGSLASGGPGPGHASLSQRLRLYLADSWNQCDLVALTCFLLGVGCRLTPGLYHLGRTVLCIDFMVFTVRLLHIFTVNKQLGPKIVIVSKMMKDVFFFLFFLGVWLVAYGVATEGLLRPRDSDFPSILRRVFYRPYLQIFGQIPQEDMDVALMEHSNCSSEPGFWAHPPGAQAGTCVSQYANWLVVLLLVIFLLVANILLVNLLIAMFSYTFGKVQGNSDLYWKAQRYRLIREFHSRPALAPPFIVISHLRLLLRQLCRRPRSPQPSSPALEHFRVYLSKEAERKLLTWESVHKENFLLARARDKRESDSERLKRTSQKVDLALKQLGHIREYEQRLKVLEREVQQCSRVLGWVAEALSRSALLPPGGPPPPDLPGSKD

SEQ ID NO: 1115 - protein, 109 aa, Homo sapiens
LIKLCKSKAKSCENDLEMGMLNSKFKKTRYQAGMRNSENLTANNTLSKPTRYQGELKEIKQDISSLRYELLEEKSQATGELADLIQQLSEKFGKNLNKDHLRVNKGKDI

SEQ ID NO: 1116 - protein, 679 aa, Homo sapiens
LPLLHAGFNRRFMENSSIIACYNELIQIEHGEVRSQFKLRACNSVFTALDHCHEAIEITSDDHVIQYVNPAFERMMGYHKGELLGKELADLPKSDKNRADLLDTINTCIKKGKEWQGVYYARRKSGDSIQQHVKITPVIGQGGKIRHFVSLKKLCCTTDNNKQIHKIHRDSGDNSQTEPHSFRYKNRRKESIDVKSISSRGSDAPSLQNRRYPSMARIHSMTIEAPITKVINIINAAQENSPVTVAEALDRVLEILRTTELYSPQLGTKDEDPHTSDLVGGLMTDGLRRLSGNEYVFTKNVHQSHSHLAMPITINDVPPCISQLLDNEESWDFNIFELEAITHKRPLVYLGLKVFSRFGVCEFLNCSETTLRAWFQVIEANYHSSNAYHNSTHAADVLHATAFFLGKERVKGSLDQLDEVAALIAATVHDVDHPGRTNSFLCNAGSELAVLYNDTAVLESHHTALAFQLTVKDTKCNIFKNIDRGNHYRTLRQAIIDMVLATEMTKHFEHVNKFVNSINKPMAAEIEGSDCECNPAGKNFPENQILIKRMMIKCADVANPCRPLDLCIEWAGRISEEYFAQTDEEKRQGLPVVMPVFDRNTCSIPKSQISFIDYFITDMFDAWDAFAHLPALMQHLADNYKHWKTLDDLKCKSLRLPSDRLKPSHRGGLLTDKGHCESQ

SEQ ID NO: 1117 - protein, 1193 aa, Homo sapiens
AFLSKVEEDDYPSEELLEDENAINAKRSKEKNPGNQGRQFDVNLQVPDRAVLGTIHPDPEIEESKQETSMILDSEKTSETAAKGVNTGGREPNTMVEKERPLADKKAQRPFERSDFSDSIKIQTPELGEVFQNKDSDYLKNDNPEEHLKTSGLAGEPEGELSKEDHENTEKYMGTESQGSAAAEPEDDSFHWTPHTSVEPGHSDKREDLLIISSFFKEQQSLQRFQKYFNVHELEALLQEMSSKLKSAQQESLPYNMEKVLDKVFRASESQILSIAEKMLDTRVAENRDLGMNENNIFEEAAVLDDIQDLIYFVRYKHSTAEETATLVMAPPLEEGLGGAMEEMQPLHEDNFSREKTAELNVQVPEEPTHLDQRVIGDTHASEVSQKPNTEKDLDPGPVTTEDTPMDAIDANKQPETAAEEPASVTPLENAILLIYSFMFYLTKSLVATLPDDVQPGPDFYGLPWKPVFITAFLGIASFAIFLWRTVLVVKDRVYQVTEQQISEKLKTIMKENTELVQKLSNYEQKIKESKKHVQETRKQNMILSDEAIKYKDKIKTLEKNQEILDDTAKNLRVMLESEREQNVKNQDLISENKKSIEKLKDVISMNASEFSEVQIALNEAKLSEEKVKSECHRVQEENARLKKKKEQLQQEIEDWSKLHAELSEQIKSFEKSQKDLEVALTHKDDNINALTNCITQLNLLECESESEGQNKGGNDSDELANGEVGGDRNEKMKNQIKQMMDVSRTQTAISVVEEDLKLLQLKLRASVSTKCNLEDQVKKLEDDRNSLQAAKAGLEDECKTLRQKVEILNELYQQKEMALQKKLSQEEYERQEREHRLSAADEKAVSAAEEVKTYKRRIEEMEDELQKTERSFKNQIATHEKKAHENWLKARAAERAIAEEKREAANLRHKLLDLTQKMAMLQEEPVIVKPMPGKPNTQNPPRRGPLSQNGSFGPSPVSGGECSPPLTVEPPVRPLSATLNRRDMPRSEFGSLDGPLPHPRWSAEASGKPSPSDPGSGTATMMNSSSRGSSPTRVLDEGKVNMAPKGPPPFPGVPLMSTPMGGPVPPPIRYGPPPQLCGPFGPRPLPPPFGPGMRPPLGLREFAPGVPPGRRDLPLHPRGFLPGHAPFRPLGSLGPREYFIPGTRLPPPTHGPQEYPPPPAVRDLLPSGSRDEPPPASQSTSQDCSQALKQSP

SEQ ID NO: 1118 - protein, 981 aa, Homo sapiens
MAADSEPESEVFEITDFTTASEWERFISKVEEVLNDWKLIGNSLGKPLEKGIFTSGTWEEKSDEISFADFKFSVTHHYLVQESTDKEGKDELLEDVVPQSMQDLLGMNNDFPPRAHCLVRWYGLREFVVIAPAAHSDAVLSESKCNLLLSSVSIALGNTGCQVPLFVQIHHKWRRMYVGECQGPGVRTDFEMVHLRKVPNQYTHLSGLLDIFKSKIGCPLTPLPPVSIAIRFTYVLQDWQQYFWPQQPPDIDALVGGEVGGLEFGKLPFGACEDPISELHLATTWPHLTEGIIVDNDVYSDLDPIQAPHWSVRVRKAENPQCLLGDFVTEFFKICRRKESTDEILGRSAFEEEGKETADITHALSKLTEPASVPIHKLSVSNMVHTAKKKIRKHRGVEESPLNNDVLNTILLFLFPDAVSEKPLDGTTSTDNNNPPSESEDYNLYNQFKSAPSDSLTYKLALCLCMINFYHGGLKGVAHLWQEFVLEMRFRWENNFLIPGLASGPPDLRCCLLHQKLQMLNCCIERKKARDEGKKTSASDVTNIYPGDAGKAGDQLVPDNLKETDKEKGEVGKSWDSWSDSEEEFFECLSDTEELKGNGQESGKKGGPKEMANLRPEGRLYQHGKLTLLHNGEPLYIPVTQEPAPMTEDLLEEQSEVLAKLGTSAEGAHLRARMQSACLLSDMESFKAANPGCSLEDFVRWYSPRDYIEEEVIDEKGNVVLKGELSARMKIPSNMWVEAWETAKPIPARRQRRLFDDTREAEKVLHYLAIQKPADLARHLLPCVIHAAVLKVKEEESLENISSVKKIIKQIISHSSKVLHFPNPEDKKLEEIIHQITNVEALIARARSLKAKFGTEKCEQEEEKEDLERFVSCLLEQPEVLVTGAGRGHAGRIIHKLFVNAQRAAAMTPPEEELKRMGSPEERRQNSVSDFPPPAGREFILRTTVPRPAPYSKALPQRMYSVLTKEDFRLAGAFSSDTSFF

SEQ ID NO: 1119 - protein, 554 aa, Homo sapiens
SPTRTGDRSVSLIVFLTEGKPTVGETHTLKILNNTREAARGQVCIFTIGIGNDVDFRLLEKLSLENCGLTRRVHEEEDAGSQLIGFYDEIRTPLLSDIRIDYPPSSVVQATKTLFPNYFNGSEIIIAGKLVDRKLDHLHVEVTASNSKKFIILKTDVPVRPQKAGKDVTGSPRPGGDGEGDTNHIERLWSYLTTKELLSSWLQSDDEPEKERLRQRAQALAVSYRFLTPFTSMKLRGPVPRMDGLEEAHGMSAAMGPEPVVQSVRGAGTQPGPLLKKPYQPRIKISKTSVDGDPHFVVDFPLSRLTVCFNIDGQPGDILRLVSDHRDSGVTVNGELIGAPAPPNGHKKQRTYLRTITILINKPERSYLEITPSRVILDGGDRLVLPCNQSVVVGSWGLEVSVSANANVTVTIQGSIAFVILIHLYKKPAPFQRHHLGFYIANSEGLSSNCHGLLGQFLNQDARLTEDPAGPSQNLTHPLLLQVGEGPEAVLTVKGHQVPVVWKQRKIYNGEEQIDCWFARNNAAKLIDGEYKDYLASHPFDTGMTLGQGMSREL

SEQ ID NO: 1120 - protein, 107 aa, Homo sapiens
VPLESLSCSHADNWKQELTKFISPDQLPVEFGGTMTDPDGNPKCLTKINYGGEVPKSYYLCKQVRLQYEHTRSVGRGSSLQVENEILFPGCVLRCPEVLQHLQPGSF

SEQ ID NO: 1121 - protein, 1241 aa, Homo sapiens
PAAPEHTDPSEPRGSVSCCSLLRGLSSGWSSPLLPAPVCNPNKAIFTVDAKTTEILVANDKACGLLGYSSQDLIGQKLTQFFLRSDSDVVEALSEEHMEADGHAAVVFGTVVDIISRSGEKIPVSVWMKRMRQERRLCCVVVLEPVERVSTWVAFQSDGTVTSCDSLFAHLHGYVSGEDVAGQHITDLIPSVQLPPSGQHIPKNLKIQRSVGRARDGTTFPLSLKLKSQPSSEEATTGEAAPVSGYRASVWVFCTISGLITLLPDGTIHGINHSFALTLFGYGKTELLGKNITFLIPGFYSYMDLAYNSSLQLPDLASCLDVGNESGCGERTLDPWQGQDPAEGGQDPRINVVLAGGHVVPRDEIRKLMESQDIFTGTQTELIAGGQLLSCLSPQPAPGVDNVPEGSLPVHGEQALPKDQQITALGREEPVAIESPGQDLLGESRSEPVDVKPFASCEDSEAPVPAEDGGSDAGMCGLCQKAQLERMGVSGPSGSDLWAGAAVAKPQAKGQLAGGSLLMHCPCYGSEWGLWWRSQDLAPSPSGMAGLSFGTPTLDEPWLGVENDREELQTCLIKEQLSQLSLAGALDVPHAELVPTECQAVTAPVSSCDLGGRDLCGGCTGSSSACYALATDLPGGLEAVEAQEVDVNSFSWNLKELFFSDQTDQTSSNCSCATSELRETPSSLAVGSDPDVGSLQEQGSCVLDDRELLLLTGTCVDLGQGRRFRESCVGHDPTEPLEVCLVSSEHYAASDRESPGHVPSTLDAGPEDTCPSAEEPRLNVQVTSTPVIVMRGAAGLQREIQEGAYSGSCYHRDGLRLSIQFEVRRVELQGPTPLFCCWLVKDLLHSQRDSAARTRLFLASLPGSTHSTAAELTGPSLVEVLRARPWFEEPPKAVELEGLAACEGEYSQKYSTMSPLGSGAFGFVWTAVDKEKNKEVVVKFIKKEKVLEDCWIEDPKLGKVTLEIAILSRVEHANIIKVLDIFENQGFFQLVMEKHGSGLDLFAFIDRHPRLDEPLASYIFRQVRAGQSRLVSAVGYLRLKDIIHRDIKDENIVIAEDFTIKLIDFGSAAYLERGKLFYTFCGTIEYCAPEVLMGNPYRGPELEMWSLGVTLYTLVFEENPFCELEETVEAAIHPPYLVSKELMSLVSGLLQPVPERRTTLEKLVTDPWVTQPVNLADYTWEEVFRVNKPESGVLSAASLEMGNRSLSDVAQAQELCGGPVPGEAPNGQGCLHPGDPRLLTS

SEQ ID NO: 1122 - protein, 395 aa, Homo sapiens
PGTSAATCRFLSPPVISLSFTGLCISDLVVAVNGVWILVETFMLKGGNFFSKHVPWSYLVFLTIYGVELFLKVAGLGPVEYLSSGWNLFDFSVTVFAFLGLLALALNMEPFYFIVVLRPLQLLRLFKLKERYRNVLDTMFELLPRMASLGLTLLIFYYSFAIVGMEFFCGIVFPNCCNTSTVADAYRWRNHTVGNRTVVEEGYYYLNNFDNILNSFVTLFELTVVNNWYIIMEGVTSQTSHWSRLYFMTFYIVTMVVMTIIVAFILEAFVFRMNYSRKNQDSEVDGGITLEKEISKEELVAVLELYREARGASSDVTRLLETLSQMERYQQHSMVFLGRRSRTKSDLSLKMYQEEIQEWYEEHAREQEQQRQLSSSAAPAAQQPPGSRQRSQTVT

SEQ ID NO: 1123 - protein, 328 aa, Homo sapiens
LAGVGTQAPPRRPGGEMAAGQNGHEEWVGSAYLFVESSLDKVVLSDAYAHPQQKVAVYRALQAALAESGGSPDVLQMLKIHRSDPQLIVQLRFCGRQPCGRFLRAYREGALRAALQRSLAAALAQHSVPLQLDLRAGAERLEALLADEERCLSCILAQQPDRLRDEELAELEDALRNLKCGSGARGGDGEVASAPLQPPVPSLSEVKPPPPPPPAQTFLFQGQPVVNRPLSLKDQQTFARSVGLKWRKVGRSLQRGCRALRDPALDSLAYEYEREGLYEQAFQLLRRFVQAEGRRATLQRLVEALEENELTSLAEDLLGLTDPNGGLA

SEQ ID NO: 1124 - protein, 667 aa, Homo sapiens
  misc_feature (1)...(667): Xaa = any amino acid or other as shown in Table 3
SSKPKLKKRFSLRSVGRSVRGSVRGILQWRGTVDPPSSAGPLETSSGPPVLGGNSNSNSSGGAGTVGRGLVSDGTSPGERWTHRFERLRLSRGGGALKDGAGMVQREELLSFMGAEEAAPDPAGVGRGGGVAGPPSGGGGQPQWQKCRLLLRSEGEGGGGSRLEFFVPPKASRPRLSIPCSSITDVRTTTALEMPDRENTFVVKVEGPSEYIMETVDAQHVKAWVSDIQECLSPGPCPATSPRPMTLPLAPGTSFLTRENTDSLELSCLNHSESLPSQDLLLGPSESNDRLSQGAYGGLSDRPSASISPSSASIAASHFDSMELLPPELPPRIPIEEGPPAGTVHPLSAPYPPLDTPETATGSFLFQGEPEGGEGDQPLSGYPWFHGMLSRLKAAQLVLTGGTGSHGVFLVRQSETRRGEYVLTFNFQGKAKHLRLSLNEEGQCRVQHLWFQSIFDMLEHFRVHPIPLESGGSSDVVLVSYVPSSQRQQGEQSRSAGEEVPVHPRSEAGSRLGAMRGCAREMDATPNASCTLMPFGASDCEPTTSHDPPQPPEPPSWTDPPQPGEEEASRAPGSGGQQAAAAAKERQEKEKAGGGGVPEELVPVVXLVPVGELGEGHRPQAQEAQGRLGPGGDAGVPPMVQLQQSPLGGDGEEGGHPRAINNQYSFV

SEQ ID NO: 1125 - protein, 387 aa, Homo sapiens
FRAPVGTAARSPQVVIRRLPPGLTKEQLEEQLRPLPAHDYFEFFAADLSLYPHLYSRAYINFRNPDDILLFRDRFDGYIFLDSKDPEYKKFLETYCVEEEKTSANPETLLGEMEAKTRELIARRTTPLLEYIKNRKLEKQRIREEKREERRRRELEKKRLREEEKRRRREEERCKKKETDKQKKIAEKEVRIKLLKKPEKGEEPTTEKPKERGEEIDTGGGKQESCAPGAVVKARPMEGSLEEPQETSHSGSDKEHRDVERSQEQESEAQRYHVDDGRRHRAHHEPERLSRRSEDEQRWGKGPGQDRGKKGSQDSGAPGEAMERLGRAQRCDDSPAPRKERLANKDRPALQLYDPGARFRARECGGNRRICKAEGSGTGPEKREEAE

SEQ ID NO: 1126 - protein, 208 aa, Homo sapiens
GVWGVCVSGLLQVGSQRAQAWRAWSPMETPLTGTFLWPHIPQGLFFDDSYGFYPGQVLIGPAKIFSSVQWLSGVKPVLSTKSKFRVVVEEVQVVELKVTWITKSFCPGGTDSVSPPPSVITQENLGRVKRLGCFDHAQRHAWGALSVCLPSQGRASQDCLGMSRKKLRPGGGLYGQEGEAPVEEAGCADHVMLPRHPVFPGPFHGRPR

SEQ ID NO: 1127 - protein, 670 aa, Homo sapiens
FRDSSPCSAFEFHCLSGECIHSSWRCDGGPDCKDKSDEENCAVATCRPDEFQCSDGNCIHGSRQCDREYDCKDMSDEVGCVNVTLCEGPNKFKCHSGECITLDKVCNMARDCRDWSDEPIKECGTNECLDNNGGCSHVCNDLKIGYECLCPDGFQLVAQRRCEDIDECQDPDTCSQLCVNLEGGYKCQCEEGFQLDPHTKACKAVGSIAYLFFTNRHEVRKMTLDRSEYTSLIPNLRNVVALDTEVASNRIYWSDLSQRMICSTQLDRAHGVSSYDTVISRDIQAPDGLAVDWIHSNIYWTDSVLGTVSVADTKGVKRKTLFRENGSKPRAIVVDPVHGFMYWTDWGTPAKIKKGGLNGVDIYSLVTENIQWPNGITLDLLSGRLYWVDSKLHSISSIDVNGGNRKTILEDEKRLAHPFSLAVFEDKVFWTDIINEAIFSANRLTGSDVNLLAENLLSPEDMVLFHNLTQPRGVNWCERTTLSNGGCQYLCLPAPQINPHSPKFTCACPDGMLLARDMRSCLTEGEAAVATQETSTVRLKVSSTAVRTQHTTTRPVPDTSRLPGATPGLTTVEIVTMSHQALGDVAGRGNEKKPSSVRALSIVLPIVLLVFLCLGVFLLWKNWRLKNINSINFDNPVYQKTTEDEVHICHNQDGYSYPSRQMVSLEDDVA

SEQ ID NO: 1128 - protein, 383 aa, Homo sapiens
RIPGLGPPGSPPPPPHVRGMPGCPCPGCGMAGPRLLFLTALALELLGRAGGSQPALRSRGTATACRLDNKESESWGALLSGERLDTWICSLLGSLMVGLSGVFPLLVIPLEMGTMLRSEAGAWRLKQLLSFALGGLLGNVFLHLLPEAWAYTCSASPGGEGQSLQQQQQLGLWVIAGILTFLALEKMFLDSKEEGTSQAPNKDPTAAAAALNGGHCLAQPAAEPGLGAVVRSIKVSGYLNLLANTIDNFTHGLAVAASFLVSKKIGLLTTMAILLHEIPHEVGDFAILLRAGFDRWSAAKLQLSTALGGLLGAGFAICTQSPKGVEETAAWVLPFTSGGFLYIALVNVLPDLLEEEDPWRSLQQLLLLCAGIVVMVLFSLFVD

SEQ ID NO: 1129 - protein, 174 aa, Homo sapiens
GKVSAGQAGADRTLRRAPEPRFSQEPTGNSAYPQLRPFLDPQGRDLKPSALVPPTRSHTGRRPWLHTQPLPGPQGRAWGPTCTPACVDRVLESEEGRREYLAFPTSKSSGQKGRKELLKGNGRRIDYMLHAEEGLCPDWKAEVEEFSFITQLSGLTDHLPVAMRLMVSSGEEEA

SEQ ID NO: 1130 - protein, 231 aa, Homo sapiens
PCGGIRLSASEAATLFGYLVVPAGGGGTFLGGFFVNKLRLRGSAVIKFCLFCTVVSLLGILVFSLHCPSVPMAGVTASYGGSLLPEGHLNLTAPCNAACSCQPEHYSPVCGSDGLMYFSLCHAGCPAATETNVDGQKVSGAAAYRPCPPLDPGKGPPCLPLVIGAIVGLPRCTETVAVSLRIFPLVLAMHCREMHFNLSEKAPPSGFHIRCNFLYIPQQHSCTNGNSTMCP

SEQ ID NO: 1131 - protein, 234 aa, Homo sapiens
LLRKVGAPGGARGVIRLLDWFERPDGFLLVLERPEPAQDLFDFITERGALDEPLARRFFAQVLAAVRHCHSCGVVHRDIKDENLLVDLRSGELKLIDFGSGALLKDTVYTDFDGTRVYSPPEWIRYHRYHGRSATVWSLGVLLYDMVCGDIPFEQDEEILRGRLLFRRRVSPECQQLIRWCLSLRPSERPSLDQIAAHPWMLGADGGAPESCDLRLCTLDPDDVASTTSSSESL

SEQ ID NO: 1132 - protein, 270 aa, Homo sapiens
GKNSQKASPVDDEQLSVCLSGFLDEVMKKYGSLVPLSEKEVLGRLKDVFNEDFSNRKPFINREITNYRARHQKCNFRIFYNKHMLDMDDLATLDGQNWLNDQVINMYGELIMDAVPDKVHFFNSFFHRQLVTKGYNGVKRWTKKVDLFKKSLLLIPIHLEVHWSLITVTLSNRIISFYDSQGIHFKFCVENIRKYLLTEAREKNRLNLQGWQTAVTKCIPQQKNDSDCGVFVLQYCKCLALKQPFQFSQEDMPRVRKRIYKELCECRLMD

SEQ ID NO: 1133 - protein, 204 aa, Homo sapiens
  misc_feature (1)...(204): Xaa = any amino acid or other as shown in Table 3
PPGGXQGSAAKHRFPKGYRHPALEARLGRRRTVQEARALLRCRRAGISAPVVFFVDYASNCLYMEEIEGSVTVRDYIQSTMETEKTPQGLSNLAKTIGQVLARMHDEDLIHGDLTTSNMLLKPPLEQLNIVLIDFGLSFISALPEDKGVDLYVLEKAFLSTHPNTETVFEAFLKSYSTSSKKARPVLKKLDEVRLRGKKRSMVG

SEQ ID NO: 1134 - protein, 531 aa, Homo sapiens
RACVFRPEDMMQGEAHPSASLIDRTIKMRKETEARKVVLAWGLLNVSMAGMIYTEMTGKLISSYYNVTYWPLWYIELALASLFSLNALFDFWRYFKYTVAPTSLVVSPGQQTLLGLKTAVVQTTPPHDLAATQIPPAPPSPSIQGQSVLSYSPSRSPSTSPKFTTSCMTGYSPQLQGLSSGGSGSYSPGVTYSPVSGYNKLASFSPSPPSPYPTTVGPVESSGLRSRYRSSPTVYNSPTDKEDYMTDLRTLDTFLRSEEEKQHRVKLGSPDSTSPSSSPTFWNYSRSMGDYAQTLKKFQYQLACRSQAPCANKDEADLSSKQAAEEVWARVAMNRQLLDHMDSWTAKFRNWINETILVPLVQEIESVSTQMRRMGCPELQIGEASITSLKQAALVKAPLIPTLNTIVQYLDLTPNQEYLFERIKELSQGGCMSSFRWNRGGDFKGRKWDTDLPTDSAIIMHVFCTYLDSRLPPHPKYPDGKTFTSQHFVQTPNKPDVTNENVFCIYQSAINPPHYELIYQRHVYIPAKGQK

SEQ ID NO: 1135 - protein, 508 aa, Homo sapiens
SSAVEFINRNNSVVQVLLAAGADPNLGDDFSSVYKTAKEQGIHSLEVLITREDDFNNRLNNRASFKGCTALHYAVLADDYRTVKELLDGGANPLQRNEMGHTPLDYAREGEVMKLLRTSEAKYQEKQRKREAEERRRFPLEQRLKEHIIGQESAIATVGAAIRRKENGWYDEEHPLVFLFLGSSGIGKTELAKQTAKYMHKDAKKGFIRLDMSEFQERHEVAKFIGSPPGYVGHEEGGQLTKKLKQCPNAVVLFDEVDKAHPDVLTIMLQLFDEGRLTDGKGKTIDCKDAIFIMTSNVASDEIAQHALQLRQEALEMSRNRIAENLGDVQISDKITISKNFKENVIRPILKAHFRRDEFLGRINEIVYFLPFCHSELIQLVNKELNFWAKRAKQRHNITLLWDREVADVLVDGYNVHYGARSIKHEVERRVGNQLAAAYEQDLLPGGCTLRITVEDSDKQLLKSPELPSPQAEKRLPKLRLEIIDKDSKTRRLDIRAPLHPEKVCNTI

SEQ ID NO: 1136 - protein, 81 aa, Homo sapiens
SSCDRERHGSLGMMSGSFILCLALVTRWSPQASSVPLAVYESKTRKSYRSQRDRDGKDRSQGMGLSLLVETRKLLLSANQG

SEQ ID NO: 1137 - protein, 260 aa, Homo sapiens
HTPMAFFLSFLSTSETVYTFVILPKMLINLLSVARTISFNCCALQMFFFLGFAITNCLLLGVMGYDRYAAICHPLHYPTLMSWQVCGKLAAACAIGGFLASLTVVNLVFSLPFCSTNKVNHYFCDISAVILLACTNTDVNGFVIFICGVLVLVVPFLFICVSYFCILRTILKIPSAEGRRKAFSTCASHLSVVIVHYGCASFIYLRPTANYVSNKDRLVTVTYTIVTPLLNPMVYSLRNKDVQLAIRKVLGKKGSLKLYN

SEQ ID NO: 1138 - protein, 393 aa, Homo sapiens
RPPAATRYPREKLKSMTSRDNYKAGSREAAAAAAAAVAAAAAAAAAAEPYPVSGAKRKYLEDSDPERSDYEEQQLQEEEEARKVKSGIRQMRLFSQDECAKIEARIDEVVSRAEKGLYNEHTVDRAPLRNKYFFGEGYTYGAQLQKRGPGQERLYPPGDVDEIPEWVHQLVIQKLVEHRVIPEGFVNSAVINDYQPGGCIVSHVDPIHIFERPIVSVSFFSDSALCFGCKFQFKPIRVSEPVLSLPVRRGSVTVLSGYAADEITHCIRPQDIKERRAVIILRKTRLDAPRLETKSLSSSVLPPSYASDRLSGNNRDPALKPKRSHRKADPDAAHRPRILEMDKEENRRSVLLPTHRRRGSFSSENYWRKSYESSEDCSEAAGSPARKVKMRRH

SEQ ID NO: 1139 - protein, 545 aa, Homo sapiens
VTWHFYFCSDHKNGHYIIPQMADRSRQKCMSQSLDLSELAKAAKKKLQALSNRLFEELAMDVYDEVDRRENDAVWLATQNHSTLVTERSAVPFLPVNPEYSATRNQGRQKLARFNAREFATLIIDILSEAKRRQQGKSLSSPTDNLELSLRSQSDLDDQHDYDSVASDEDTDQEPLRSTGATRSNRARSMDSSDLSDGAVTLQEYLELKKALATSEAKVQQLMKVNSSLSDELRRLQREHFAPIIHKLQAENLQLRQPPGPVPTPPLPSERAEHTPMAPGGSTHRRDRQAFSMYEPGSALKPFGGPPGDELTTRLQPFHSTELEDDAIYSVHVPAGLYRIRKGVSASAVPFTPSSPLLSCSQEGSRHTSKLSRHGSGADSDYENTQSGDPLLGLEGKRFLELGKEEDFHPELESLDGDLDPGLPSTEDVILKTEQVTKNIQELLRAAQEFKHDSFVPCSEKIHLAVTEMASLFPKRPALEPVRSSLRLLNASAYRLQSECRKTVPPEPGAPVDFQLLTQQVIQCAYDIAKAAKQLVTITTREKKQ

SEQ ID NO: 1140 - protein, 621 aa, Homo sapiens
RYLSYGSGPKRFPLVDVLQYALEFASSKPVCTSPVDDIDASSPPSGSIPSQTLPSTTEQQGALSSELPSTSPSSVAAISSRSVIHKPFTQSRIPPDLPMHPAPRHITEEELSVLESCLHRWRTEIENDTRDLQESISRIHRTIELMYSDKSMIQVPYRLHAVLVHEGQANAGHYWAYIFDHRESRWMKYNDIAVTKSSWEELVRDSFGGYRNASAYCLMYINDKAQFLIQEEFNKETGQPLVGIETLPPDLRDFVEEDNQRFEKELEEWDAQLAQKALQEKLLASQKLRESETSVTTAQAAGDPKYLEQPSRSDFSKHLKEETIQIITKASHEHEDKSPETVLQSAIKLEYARLVKLAQEDTPPETDYRLHHVVVYFIQNQAPKKIIEKTLLEQFGDRNLSFDERCHNIMKVAQAKLEMIKPEEVNLEEYEEWHQDYRKFRETTMYLIIGLENFQRESYIDSLLFLICAYQNNKELLSKGLYRGHDEELISHYRRECLLKLNEQAAELFESGEDREVNNGLIIMNEFIVPFLPLLLVDEMEEKDILAVEDMRNRWCSYLGQEMEPHLQEKLTDFLPKLLDCSMEIKSFHEPPKLPSYSTHELCERFARIMLSLSRTPADGR

SEQ ID NO: 1141 - protein, 154 aa, Homo sapiens
AQVYVRMDSFDEDLARPSGLLAQERKLCRDLVHSNKKEQEFRSIFQHIQSAQSQRSPSELFAQHMVPIVHHVKEHHFGSSGMTLHERFTKYLKRGTEQEAAKNKKSPEIHRRIDISPSTFRKHGLAHDEMKSPREPGYKDGHNSKNELQRVNFY

SEQ ID NO: 1142 - protein, 121 aa, Homo sapiens
TYTFCFSLMIILLTIIQGLILEAFGELRDQLDQVKEDMETKCFICGIGNDYFDTVPHGFETHTLQEHNLANYLFFLMYLINKDETEHTGQESYVWKMYQERCWEFFPAGDCFRKQYEDQLN

SEQ ID NO: 1143 - protein, 851 aa, Homo sapiens
FRRKGGGGPKDFGAGLKYNSRHEKVNGLEEGVEFLPVNNVKKVEKHGPGRWVVLAAVLIGLLLVLLGIGFLVWHLQYRDVRVQKVFNGYMRITNENFVDAYENSNSTEFVSLASKVKDALKLLYSGVPFLGPYHKESAVTAFSEGSVIAYYWSEFSIPQHLVEEAERVMAEERVVMLPPRARSLKSFVVTSVVAFPTDSKTVQRTQDNSCSFGLHARGVELMRFTTPGFPDSPYPAHARCQWALRGDADSVLSLTFRSFDLASCDERGRHLVTVYNTLSPMEPHALVQLCGTYPPSYNLTFHSSQNVLLITLITNTERRHPGFEATFFQLPRMSSCGGRLRKAQGTFNSPYYPGHYPPNIDCTWNIEVPNNQHVKVRFKFFYLLEPGVPAGTCPKDYVEINGEKYCGERSQFVVTSNSNKITVRFHSDQSYTDTGFLAEYLSYDSSDPCPGQFTCRTGRCIRKELRCDGWADCTDHSDELNCSCDAGHQFTCKNKFCKPLFWVCDSLNDCGDNSDEQGCSCPAQTFRCSNGKCLSKSQQCNGKDDCGDGSDEASCPKVNVVTCTKHTYRCLNGLCLSKGNPECDGKEDCSDGSDEKDCDCGLRSFTRQARVVGGTDADEGEWPWQVSLHALGQGHICGASLISPNWLVSAAHCYIDDRGFRYSDPTQWTAFLGLHDQSQRSAPGVQERRLKRIISHPFFNDFTFDYDIALLELEKPAEYSSMVRPICLPDASHVFPAGKAIWVTGWGHTQYGGTGALILQKGEIRVINQTTCENLLPQQITPRMMCVGFLSGGVDSCQGDSGGPLSSVEADGRIFQAGVVSWGDGCAQRNKPGVYTRLPLFRDWIKENTGV

SEQ ID NO: 1144 - protein, 346 aa, Homo sapiens
  misc_feature (1)...(346): Xaa = any amino acid or other as shown in Table 3
RHEEDLGNLWENTRFTDCSFFVRGQEFKAHKSVLAARSPVFNAMFEHEMEESKKNRVEINDLDPEVFKEMMRFIYTGRAPNLDKMADNLLAAADKYALERLKVMCEKALCSNLSVENVADTLVLADLHSAEQLKAQAIDFINRCSVLRQLGCKDGKNWNSNQATDIMETSGGKSMIQSHPHLVAEAFRALASAQGPQFGIPRKRLKQSXNLGNLWENTRFTDCSFFVRGQEFKAHKSVLAARSPVFNAMFEHEMEESKKNRVEINDLDPEVFKEMMRFIYTGRAPNLDKMADNLLAAADKYALERLKVMCEKALCSNLSVENVADTLVLADLHSGRTVESTSHRLY

SEQ ID NO: 1145 - protein, 339 aa, Homo sapiens
  misc_feature (1)...(339): Xaa = any amino acid or other as shown in Table 3
QRGGIPGKFQEDSGSVDWALGPFWGIFQADFGCMRFYLSAQTSDPVLRMXWGPSPISHPTSLCPGGGGAGQTTGSLCLGQQCCPLSCPNIPSRHKRWRLXAALVAGSRGSCTLRSXRXRTPLPVTRNLPRCHLHLHPTGDLRVHVHQHCLLHGHVPPGAALLQCGGCDLRGEAAGLLFLGHACLRGSVNLRRDQWLPVPYSRLCFSGAREGHLPSLLAMIHVRHCTPIPALLVCPIKVNLLIPVAYLVFWAFLLVFSFISEHMVCGVGVIIILTGVPIFFLGVFWRSKPKCVHRLTESMTHWGQELCFVVYPQDAPEEEENGPCPPSLLPATDKPSKPQ

SEQ ID NO: 1146 - protein, 425 aa, Homo sapiens
  misc_feature (1)...(425): Xaa = any amino acid or other as shown in Table 3
AAALVAEYLALLEDHRHLPVGCVSFQNISSNVLEESAISDDILSPDEEGFCSGKHFTELGLVGLLEQAAGYFTMGGLYEAVNEVYKNLIPILEAHRDYKKLAAVHGKLQEAFTKIMHQSSGWERVFGTYFRVGFYGAHFGDLDEQEFVYKEPSITKLAEISHRLEEFYTERFGDDVVEIIKDSNPVDKSKLDSQKAYIQITYVEPYFDTYELKDRVTYFDRNYGLRTFLFCTPFTPDGRAHGELPEQHKRKTLLSTDHAFPYIKTRIRVCHREETVLTPVEVAIEDMQKKTRELAFATEQDPPDAKMLQMVLQGSVGPTVNQGPLEVAQVFLAEIPEDPKLFRHHNKLRLCFKDFXKKCEDALRKNKALIGPDQKEYHRELERNYCRLREALQPLLTQRLPQLMAPTPPGLRNSLNRASFRKADL

SEQ ID NO: 1147 - protein, 198 aa, Homo sapiens
  misc_feature (1)...(198): Xaa = any amino acid or other as shown in Table 3
GEGQQWQSTPLSPLQPTVADFLNLAWWTSAAAWXVLSGRWVEKVLPGREGSEEKXGMASSSADHLHSAPRALQSLFQQLLYGLIYHSWFQAGRXGFGGASSSPGPQSELRRLHGEGGVYDXGRPETLPGSVGGAEALWALADPAEAEGSPETRESSCVMKQTQYYFGSVNASYNAIIDCGNCSRCWQWGGTRGQGRNL

SEQ ID NO: 1148 - protein, 317 aa, Homo sapiens
VAGIPACFDNFTEALAETACRQMGYSSKPTFRAVEIGPDQDLDVVEITENSQELRMRNSSGPCLSGSLVSLHCLACGESLKTPRVVGGEEASVDSWPWQVSIQYDKQHVCGGSILDPHWVLTAAHCFRKHTDVFNWKVRAGSDKLGSFPSLAVAKIIIIEFNPMYPKDNDIALMKLQFPLTFSGTVRPICLPFFDEELTPATPLWIIGWGFTKQNGGKMSDILLQASVQVIDSTRCNADDAYQGEVTEKMMCAGIPEGGVDTCQGDSGGPLMYQSDQWHVVGIVSWGYGCGGPSTPGVYTKVSAYLNWIYNVWKAEL

SEQ ID NO: 1149 - protein, 320 aa, Homo sapiens
TISTVRWNSRIGMVLGVAIQKRAVPGLYAFEEAYARADKEAPRPCHKGSWCSSNQLCRECQAFMAHTMPKLKAFSMSSAYNAYRAVYAVAHGLHQLLGCASGACSRGRVYPWQLLEQIHKVHFLLHKDTVAFNDNRDPLSSYNIIAWDWNGPKWTFTVLGSSTWSPVQLNINETKIQWHGKDNQVPKSVCSSDCLEGHQRVVTGFHHCCFECVPCGAGTFLNKSSYLGKDLPENYNEAKCVTFSLLFNFVSWIAFFTTASVYDGKYLPAANMMAGLSSLSSGFGGYFLPKCYVILCRPDLNSTEHFQASIQDYTRRCGST

SEQ ID NO: 1150 - protein, 458 aa, Homo sapiens
VARGAFHPKMGPSFPSPKPGSERLSFVSAKQSTGQDTEAELQDATLALHGLTVEDEGNYTCEFATFPKGSVRGMTWLRVIAKPKNQAEAQKVTFSQDPTTVALCISKEGRPPARISWLSSLDWEAKETQVSGTLAGTVTVTSRFTLVPSGRADGVTVTCKVEHESFEEPALIPVTLSVRYPPEVSISGYDDNWYLGRTDATLSCDVRSNPEPTGYDWSTTSGTFPTSAVAQGSQLVIHAVDSLFNTTFVCTVTNAVGMGRAEQVIFVRETPNTAGAGATGGIIGGIIAAIIATADATGILICRQQRKEQTLQGAEEDEDLEGPPSYKPPTPKAKLEAQEMPSQLFTLGASEHSPLKTPYFDAGASCTEQEMPRYHELPTLEERSGPLHPGATSLGSPIPVPPGPPAVEDVSLDLEDEEGEEEEEYLDKINPIYDALSYSSPSDSYQGKGFVMSRAMYV

SEQ ID NO: 1151 - protein, 608 aa, Homo sapiens
GTRLREDKNHNMYVAGCTEVEVKSTEEAFEVFWRGQKKRRIANTHLNRESSRSHSVFNIKLVQAPLDADGDNVLQEKEQITISQLSLVDLAGSERTNRTRAEGNRLREAGNINQSLMTLRTCMDVLRENQMYGTNKMVPYRDSKLTHLFKNYFDGEGKVRMIVCVNPKAEDYEENLQVMRFAEVTQEVEVARPVDKAICGLTPGRRYRNQPRGPIGNEPLVTDVVLQSFPPLPSCEILDINDEQTLPRLIEALEKRHNLRQMMIDEFNKQSNAFKALLQEFDNAVLSKENHMQGKLNEKEKMISGQKLEIERLEKKNKTLEYKIEILEKTTTIYEEDKRNLQQELETQNQKLQRQFSDKRRLEARLQGMVTETTMKWEKECERRVAAKQLEMQNKLWVKDEKLKQLKAIVTEPKTEKPERPSRERDREKVTQRSVSPSPVPLLFQPDQNAPPIRLRHRRSRSAGDRWVDHKPASNMQTETVMQPHVPHAITVSVANEKALAKCEKYMLTHQELASDGEIETKLIKGDIYKTRGGGQSVQFTDIETLKQESPNGSRKRRSSTVAPAQPDGAESEWTDVETRCSVAVEMRAGSQLGPGYQHHAQPKRKKP

SEQ ID NO: 1152 - protein, 111 aa, Homo sapiens
PFSSSSVSSKGSDPFGTLDPFGSGSFNSAEGFADFSQMSKGKSTPVSQLGSADFPEAPDPFQPLGADSGDPFQSKKGFGDPFSGKDPFVPSSAAKPSKASASGFADFTSVS

SEQ ID NO: 1153 - protein, 444 aa, Homo sapiens
MSLMVVSMACVGLFLVQRAGPHMGGQDKPFLSAWPSAVVPRGGHVTLRCHYRHRFNNFMLYKEDRIHIPIFHGRIFQESFNMSPVTTAHAGNYTCRGSHPHSPTGWSAPSNPVVIMVTGNHRKPSLLAHPGPLVKSGERVILQCWSDIMFEHFFLHKEGISKDPSRLVGQIHDGVSKANFSIGPMMQDLAGTYRCYGSVTHSPYQLSAPSDPLDIVITGLYEKPSLSAQPGPTVLAGESVTLSCSSRSSYDMYHLSREGEAHERRFSAGPKVNGTFQADFPLGPATHGGTYRCFGSFRDSPYEWSNSSDPLLVSVTGNPSNSWPSPTEPSSETGNPRHLHVLIGTSVVIILFILLLFFLLHRWCSNKKNAAVMDQESAGNRTANSEDSDEQDPQEVTYTQLNHCVFTQRKITRPSQRPKTPPTDIIVYTELPNAESRSKVVSCP

SEQ ID NO: 1154 - protein, 522 aa, Homo sapiens
MSLRVHTLPTLLGAVVRPGCRELLCLLMITVTVGPGASGVCPTACICATDIVSCTNKNLSKVPGNLFRLIKRLDLSYNRIGLLDSEWIPVSFAKLNTLILRHNNITSISTGSFSTTPNLKCLDLSSNKLKTVKNAVFQELKVLEVLLLYNNHISYLDPSAFGGLSQLQKLYLSGNFLTQFPMDLYVGRFKLAELMFLDVSYNRIPSMPMHHINLVPGKQLRGIYLHGNPFVCDCSLVSLLVFWYRRHFSSVMDFKNDYTCRLWSDSRHSRQVLLLQDSFMNCSDSIINGSFRALGFIHEAQVGERLMVHCDSKTGNANTDFIWVGPDNRLLEPDKEMENFYVFHNGSLVIESPRFEDAGVYSCIAMNKQRLLNETVDVTINVSNFTVSRSHAHEAFNTAFTTLAACVASIVLVLLYLYLTPCPCKCKTKRQKNMLHQSNAHSSILSPGPASDASADERKAGAGKRVVFLEPLKDTAAGQNGKVRLFPSEAVIAEGILKSTRGKSDSDSVNSVFSDTPFVAST

SEQ ID NO: 1155 - protein, 642 aa, Homo sapiens
ASDFIRSLDHCGYLSLEGVFSHKFDFELQDVSSVNEDVLLTTGLLCKYTAQRFKPKYKFFHKSFQEYTAGRRLSSLLTSHEPEEVTKGNGYLQKMVSISDITSTYSSLLRYTCGSSVEATRAVMKHLAAVYQHGCLLGLSIAKRPLWRQESLQSVKNTTEQEILKAININSFVECGIHLYQESTSKSALSQEFEAFFQGKSLYINSGNIPDYLFDFFEHLPNCASALDFIKLGFYGGAMASWEKAAEDTGGIHMEEAPETYIPSRAVSLFFNWKQEFRTLEVTLRDFSKLNKQDIRYLGKIFSSATSLRLQIKRCAGVAGSLSLVLSTCKNIYSLMVEASPLTIEDERHITSVTNLKTLSIHDLQNQRLPGGLTDSLGNLKNLTKLIMDNIKMNEEDAIKLAEGLKNLKKMCLFHLTHLSDIGEGMDYIVKSLSSEPCDLEEIQLVSCCLSANAVKILAQNLHNLVKLSILDLSENYLEKDGNEALHELIDRMNVLEQLTALMLPWGCDVQGSLSSLLKHLEEVPQLVKLGLKNWRLTDTEIRILGAFFGKNPLKNFQQLNLAGNRVSSDGWLAFMGVFENLKQLVFFDFSTKEFLPDPALVRKLSQVLSKLTFLQEARLVGWQFDDDDLSVITGAFKLVTA

SEQ ID NO: 1156 - protein, 125 aa, Homo sapiens
  misc_feature (1)...(125): Xaa = any amino acid or other as shown in Table 3
ASDRKVAMTCDCFWFRTMLDQHASCMEVGTERERQAGGLVMFDPSGFPTGEKVLQDDEFTCDLFRFLQLLCEGHNSGLXVPGTSDDTKAXIMFSSQXXQEPVSSNYASFXRQQIILEHGSALGSG

SEQ ID NO: 1157 - protein, 91 aa, Homo sapiens
  misc_feature (1)...(91): Xaa = any amino acid or other as shown in Table 3
EITHIVGETAAFLCPRLRLRRGGKDGSPKPGFLASVIPVDRRPGEXDITHIVGETAAFLCPRLRLRRGGKDGSPKPGFLASVIPVDRRPGE

SEQ ID NO: 1158 - protein, 254 aa, Homo sapiens
  misc_feature (1)...(254): Xaa = any amino acid or other as shown in Table 3
SKFIFYVDSQSMIFFFQTPTRHKVLIMEFCPCGSLYTVLEEPSNAYGLPESEFLIVLRDVVGGMNHLRENGIVHRDIKPGNIMRVIGEDGQSVYKLTDFGAARELEDDEQFVSLYGTEEYLHPDMYERAVLRKDHQKKYGATVDLWSIGVTFYQGKPTGSLAIXHPFEGASVRNKASDGIKIITGKGLLGAISGVQKSKKNGPIDWEWEDMPVSCSPSSGVLRVPNLPPVLANILESRSRKKCWGFXPSFLQEN

SEQ ID NO: 1159 - protein, 162 aa, Homo sapiens
GSTISCERSLRSLWTAHWALPEMDSRIPYDDYPVVFLPAYENPPAWIPPHERVHHPDYNNELTQFLPRTITLKKPPGAQLGFNIRGGKASQLGIFISKVIPDSDAHRAGLQEGDQVLAVNDVDFQDIEHSKAVEILKTAREISMRVRFFPYNYHRQKERTVH

SEQ ID NO: 1160 - protein, 295 aa, Homo sapiens
HEQVSALHRRIKAIVEVAAMCGVNIICFQEAWTMPFAFCTREKLPWTEFAESAEDGPTTRFCQKLAKNHDMVVVSPILERDSEHGDVLWNTAVVISNSGAVLGKTRKNHIPRVGDFNESTYYMEGNLGHPVFQTQFGRIAVNICYGRHHPLNWLMYSINGAEIIFNPSATIGALSESLWPIEARNAAIANHCFTCAINRVGTEHFPNEFTSGDGKKAHQDFGYFYGSSYVAAPDSSRTPGLSRSRDGLLVAKLDLNLCQQVNDVWNFKMTGRYEMYARELAEAVKSNYSPTIVKE

SEQ ID NO: 1161 - protein, 1621 aa, Homo sapiens
  misc_feature (1)...(1621): Xaa = any amino acid or other as shown in Table 3
MAKSGGCGAGAGVGGGNGALTWVNNAAKKEESETANKNDSSKKLSVERVYQKKTQLEHILLRPDTYIGSVEPLTQFMWVYDEDVGMNCREVTFVPGLYKIFDEILVNAADNKQRDKNMTCIKVSIDPESNIISIWNNGKGIPVVEHKVEKVYVPALIFGQLLTSSNYDDDEKKVTGGRNGYGAKLCNIFSTKFTVETACKEYKHSFKQTWMNNMMKTSEAKIKHFDGEDYTCITFQPDLSKFKMEKLDKDIVALMTRRAYDLAGSCRGVKVMFNGKKLPVNGFRSYVDLYVKDKLDETGVALKVIHELANERWDVCLTLSEKGFQQISFVNSIATTKGGRHVDYVVDQVVGKLIEVVKKKNKAGVSVKPFQVKNHIWVFINCLIENPTFDSQTKENMTLQPKSFGSKCQLSEKFFKAASNCGIVESILNWVKFKAQTQLNKKCSSVKYSKIKGIPKLDDANDAGGKHSLECTLILTEGDSAKSLAVSGLGVIGRDRYGVFPLRGKILNVREASHKQIMENAEINNIIKIVGLQYKKSYDDAQSLKTLRYGKIMIMTDQDQDGSHIKGLLINFIHHNWPSLLKHGFLEEFITPIVKASKNKQELSFYSIPEFDEWKKHIENQKAWKIKYYKGLGTSTAKEAKEYFADMERHRILFRYAGPEDDAAITLAFSKKKIDDRKEWLTNFMEDRRQRRLHGLPEQFLYGTATKHLTYNDFINKELILFSNSDNERSIPSLVDGFKPGQRKVLFTCFKRNDKREVKVAQLAGSVAEMSAYHHGEQALMMTIVNLAQNFVGSNNINLLQPIGQFGTRLHGGKDAASPRYIFTMLSTLARLLFPAVDDNLLKFLYDDNQRVEPEWYIPIIPMVLINGAEGIGTGWACKLPNYDAREIVNNVRRMLDGLDPHPMLPNYKNFKGTIQELGQNQYAVSGEIFVVDRNTVEITELPVRTWTQVYKEQVLEPMLNGTDKTPALISDYKEYHTDTTVKFVVKMTEEKLAQAEAAGLHKVFKLQTTLTCNSMVLFDHMGCLKKYETVQDILKEFFDLRLSYYGLRKEWLVGMLGAEFTKLNNQARFILEKIQGKITIXNRSKKDLIQMLVQRGYESDPVKAWKEAQEKAAEEDETQNQHDDSSSDSGTPSGPDFNYILNMSLWSLTKEKVEELIKQRDAKGREVNDLKRKSPSDLWKEDLAAFVEELDKVESQEREDVLAGMSGKAIKGKVGKPKVKKLQLEETMPSPYGRRIIPEITAMKADASKKLLKKKKGDLDTAAVKVEFDEEFSGAPVEGAGEEALTPSVPINKGPKPKREKKEPGTRVRKTPTSSGKPSAKKVKKRNPWSDDESKSESDLEETEPVVIPRDSLLRRAAAERPKYTFDFSEEEDDDADDDDDDNNDLEELKVKASPITNDGEDEFVPSDGLDKDEYTFSPGKSKATPEKSLHDKKSQDFGNLFSFPSYSQKSEDDSAKFDSNEEDSASVFSPSFGLKQTDKVPSKTVAAKKGKPSSDTVPKPKRAPKQKKVVEAVNSDSDSEFGIPKKTTTPKGKGRGAKKRKASGSENEGDYNPGRKTSKTTSKKPKKTSFDQDSDVDIFPSDFPTEPPSLPRTGRARKEVKYFAESDEEEDDVDFAMFN

SEQ ID NO: 1162 - protein, 73 aa, Homo sapiens
  misc_feature (1)...(73): Xaa = any amino acid or other as shown in Table 3
KGCLAASFNCIFLYTGELYPTMIRXVEAXWENDSLFLGKDILLCTGQTPELNQVHPSPKAPPNTHHCKAHSSH

SEQ ID NO: 1163 - protein, 336 aa, Homo sapiens
ENSFECKDCGKAFSRGYQLSHHQKIHTGEKPYECKECKKAFRWGNQLTQHQKIHTGEKPYECKDCGKAFRWGSSLVIHKRIHTGEKPYECKDCGKAFRRGDELTQHQRFHTGEKDYECKDCGKTFSRVYKLIQHKRIHSGEKPYECKDCGKAFICGSSLIQHKRIHTGEKPYECQECGKAFTRVNYLTQHQKIHTGEKPHECKECGKAFRWGSSLVKHERIHTGEKPYKCTECGKAFNCGYHLTQHERIHTGETPYKCKECGKAFIYGSSLVKHERIHTGVKPYGCTECGKSFSHGHQLTQHQKTHSGAKSYECKECGKACNHLNHLREHQRIHNS

SEQ ID NO: 1164 - protein, 118 aa, Homo sapiens
  misc_feature (1)...(118): Xaa = any amino acid or other as shown in Table 3
HQYLDDLYPLHVMTILLKSHFFTMLKRPVGSSSFASLPFYHQSILLRKNQMKRKKTQQDLTHINWTLQAVSIQTCIWLQKKPSSYFHQLPNQVLXPENSGPESCLYDLAAVVVHHGSG

SEQ ID NO: 1165 - protein, 145 aa, Homo sapiens
  misc_feature (1)...(145): Xaa = any amino acid or other as shown in Table 3
XLDPDTLPAVATLLMDVMFYSNGVKDPMATGDDCGHIRFFSFSLIEGYISLVMDVQTQQRFPSNLLFTSASGELWKMVRIGGQPLGFGPVWESGPTGPTSPLILPVTPSSSHRQAASQVTTTKQGQWLCLKRPSARSPDHTACLG

SEQ ID NO: 1166 - protein, 84 aa, Homo sapiens
  misc_feature (1)...(84): Xaa = any amino acid or other as shown in Table 3
EAPLTSVCFSLERRFGSSSNTTSFGTLASQNAPTFGSLSQQTSGFGTQSSGFSGFGSGTGGFSFGSNNSXVSPFLSLTLIKSIK

SEQ ID NO: 1167 - protein, 112 aa, Homo sapiens
  misc_feature (1)...(112): Xaa = any amino acid or other as shown in Table 3
EEPQGSPIWVWLAGSLTSVSCFLPFQRMRIKPHQGQYIGEMSFLQHHKGECRPQKDXARQENPCGPCSERRKHLLGQDPKTCKCSCKNTDSRCKARPLELNERTCRCDKPRR

SEQ ID NO: 1168 - protein, 319 aa, Homo sapiens
  misc_feature (1)...(319): Xaa = any amino acid or other as shown in Table 3
TLWAGPGLCPQSHSSSSVPAPWEPHVERALRTDRNQGQRPLLSASWAPAPARPLFLTSPVLLPKSRAIPAARDPSXAGIFCLLEMAGGQASVVIIGSAGVLGCRWGSSGKSHSLSPSRKGNLHLLSQEPQTTVVHNATDGIKGSTESCNTTTEDEDLKVRKQEIIKITEQLIEAINNGDFEAYTKICDPGLTSFEPEALGNLVEGMDFHKFYFENREWVRAADILLPAPLPLCLCLLLTFSSQLPTFPLFDLRAALLLCMLVPLCPDGCRQAPLKALLLSSKCHSFCSCFVAVPVTTIKLTYFLPGAVAYACNPNTLGG

SEQ ID NO: 1169 - protein, 96 aa, Homo sapiens
ERAGAGGAAACRAGTRSGATSRTPWPLHRQLSMMLMLAQSNPQLFALMGTRAGIARELERVEQQSRLEQLSAAELQSRNQGHWADWLQAYRARLGQ

SEQ ID NO: 1170 - protein, 145 aa, Homo sapiens
  misc_feature (1)...(145): Xaa = any amino acid or other as shown in Table 3
NGTLFIMVMHIKDLVSDYKEXWLXRKPLPWXEALLLRDCFFFXVTENGADPNPYVKTYLLPDNHKTSKRKTKISRKTRNPTFNEMLVYSGYSKETLRQRELQLSVLSAESLRENFFLGGVTLPLKDFNLSKETVKWYQLTAATYL

SEQ ID NO: 1171 - protein, 464 aa, Homo sapiens
LHRIMQLAVVVSQVLENGSSVLVCLEEGWDITAQVTSLVQLLSDPFYRTLEGFQMLVEKEWLSFGHKFSQRSSLTLNCQGSGFAPVFLQFLDCVHQVHNQYPTEFEFNLYYLKFLAFHYVSNRFKTFLLDSDYERLEHGTLFDDKGEKHAKKGVCIWECIDRMHKRSPIFFNYLYSPLEIEALKPNVNVSSLKKWDYYIEETLSTGPSYDWMMLTPKHFPSEDSDLAGEAGPRSQRRTVWPCYDDVSCTQPDALTSLFSEIEKLEHKLNQAPEKWQQLWERVTVDLKEEPRTDRSQRHLSRSPGIVSTNLPSYQKRSLLHLPDSSMGEEQNSSISPSNGVERRAATLYSQYTSKNDENRSFEGTLYKRGALLKGWKPRWFVLDVTKHQLRYYDSGEDTSCKGHIDLAEVEMVIPAGPSMGAPKHTSDKAFFDLKTSKRVYNFCAQDGQSAQQWMDKIQSCISDA

SEQ ID NO: 1172 - protein, 256 aa, Homo sapiens
EVEGPRRVSPAPETLGMEESVVRPSVFVVDGQTDIPFTRLGRSHRRQSCSVARVGLGLLLLLMGAGLAVQGWFLLQLHWRLGEMVTRLPDGPAGSWEQLIQERRSHEVNPAAHLTGANSSLTGSGGPLLWETQLGLAFLRGLSYHDGALVVTKAGYYYIYSKVQLGGVGCPLGLASTITHGLYKRTPRYPEELELLVSQQSPCGRATSSSRVWWDSSFLGGVVHLEAGEEVVVRVLDERLVRLRDGTRSYFGAFMV

SEQ ID NO: 1173 - protein, 117 aa, Homo sapiens
  misc_feature (1)...(117): Xaa = any amino acid or other as shown in Table 3
QSAELGPRRREGSRRPSCTKASKPWRRRPGGPTSGLGXGPLSPGPYQCRPSLPAQLYPQSLMAAATLRTPTQVSAASSRPHTPSPTHVLKPSVRGACSSPRCPGSGTLRRSWVGPFF

SEQ ID NO: 1174 - protein, 370 aa, Homo sapiens
LWWPPLSRHAAHRQWPGPTAPRGLGHKVKGRGASPAAMWSCSWFNGTGLVEELPACQDLQLGLSLLSLLGLVVGVPVGLCYNALLVLANLHSKASMTMPDVYFVNMAVAGLVLSALAPVHLLGPPSSRWALWSVGGEVHVALQIPFNVSSLVAMYSTALLSLDHYIERALPRTYMASVYNTRHVCGFVWGGALLTSFSSLLFYICSHVSTRALECAKMQNAEAADATLVFIGYVVPALATLYALVLLSRVRREDTPLDRDTGRLEPSAHRLLVATVCTQFGLWTPHYLILLGHTVIISRGKPVDAHYLGLLHFVKDFSKLLAFSSSFVTPLLYRYMNQSFPSKLQRLMKKLPCGDRHCSPDHMGVQQVLA

SEQ ID NO: 1175 - protein, 145 aa, Homo sapiens
SESELFTLMPSLPTTNCVHSLQMIPPLSPAPNQELVLGLCYMSYLAFLYMTFDFCCLYFSTVYAPSFKYICVHTDTHICVCVCIYLSSVVSKSSAEADGVLQPRRHPASLLIVFATSISESSLLIFSFQKTEAKLIVFAVSLAAK

SEQ ID NO: 1176 - protein, 50 aa, Homo sapiens
FFFLRQSLTLSPRLECSGATSASPSAGITGMSHHSQPIVNFLRACIPISK

SEQ ID NO: 1177 - protein, 231 aa, Homo sapiens
RQHAEERGRRNPKTGLTLERVGPESSPYLLRRHQRQGQEGEHYHSCVQLAPTRGLEESGHGPLSLAGGPRVGGVAAAATEAPRMEWKVKVRSDGTRYVAKRPVRDRLLKARALKIREERSGMTTDDDAVSEMKMGRYWSKEERKQHLIRAREQRKRREFMMQSRLECLREQQNGDSKPELNIIALSHRKTMKKRNKKILDNWITIQEMLAHGARSADGKRVYNPLLSVTTV

SEQ ID NO: 1178 - protein, 204 aa, Homo sapiens
SDRGCSAAAGRNMTAVGVQAQRPLGQRQPRRSFFESFIRTLIITCVALAVVLSSVSICDGHWLLAEDRLFGLWHFCTTTNQSVPICFRDLGQAHVPGLAVGMGLVRSVGALAVVAAIFGLEFLMVSQLCEDKHSQCKWVMGSILLLVSFVLSSGGLLGFVILLRNQVTLIGFTLMFWCEFTASFLLFLNAISGLHINSITHPWE

SEQ ID NO: 1179 - protein, 179 aa, Homo sapiens
QILPNLYLGSARDSANLESLAKLGIRYILNVTPNLPNFFEKNGDFHYKQIPISDHWSQNLSRFFPEAIEFIDEALSQNCGVLVHCLAGVSRSVTVTVAYLMQKLHLSLNDAYDLVKRKKSNISPNFNFMGQLLDFERSLRLEERHSQEQGSGGQASAASNPPSFFTTPTSDGAFELAPT

SEQ ID NO: 1180 - protein, 159 aa, Homo sapiens
RKSLHENKLKRLQEKVEVLEAKKEELETENQVLNRQNVPFEDYTRLQKRLKDIQRRHNEFRSLILVPNMPPTASINPVSFQSSAMGSKHGTTISSSYAGGTTSKGTLSTSQKTRRTGNNTKKTTRGTWIFRRMMFLENRQIKRGEVGDSVKLDILTCGI

SEQ ID NO: 1181 - protein, 328 aa, Homo sapiens
  misc_feature (1)...(328): Xaa = any amino acid or other as shown in Table 3
GRPGAGASELFPSVTTDLSVSKQNACLTCVDFVTVHVCMGFWGIGPGALSTSCIPYPLSHGPGSVKAEMLHMYSQKDPLILCVRLAVLLAVTLTVPVVLFPIRRALQQLLFPGKAFSWPRHVAIALILLVLVNVLVICVPTIRDIFGVIGSTSAPSLIFILPSIFYLRIVPSEVEPFLSWPKIQALCFGVLGVLFMAVSLGFMFANWATGQSRMSGHXSGPAGPGPCAHAHGGVRAAPXGPSCPTCGGGWFPXTWLSEAGDSRGCRLAHFPPPQGCQAWIMALIPTPTPWEEEEEEEEEEEEEEEEEEEEARSWWSLCPAQSSLPPPG

SEQ ID NO: 1182 - protein, 144 aa, Homo sapiens
INELRYHLEESRDKNVLLCLEERDWDPGLAIIDNLMQSINQSKKTVFVLTKKYAKSWNFKTAFYLALQRLMDENMDVIIFILLEPVLQHSQYLRLRQRICKSSILQWPDNPKAEGLFWQTLRNVVLTENDSRYNNMYVDSIKQY

SEQ ID NO: 1183 - protein, 484 aa, Homo sapiens
DDPIKTSWTPPRYVLSMSEERHERVRKKYHILVEGDGIPPPIKSFKEMKFPAAILRGLKKKGIHHPTPIQIQGIPTILSGRDMIGIAFTGSGKTLVFTLPVIMFCLEQEKRLPFSKREGPYGLIICPSRELARQTHGILEYYCRLLQEDSSPLLRCALCIGGMSVKEQMETIRHGVHMMVATPGRLMDLLQKKMVSLDICRYLALDEADRMIDMGFEGDIRTIFSYFKGQRQTLLFSATMPKKIQNFAKSALVKPVTINVGRAGAASLDVIQEVEYVKEEAKMVYLLECLQKTPPPVLIFAEKKADVDAIHEYLLLKGVEAVAIHGGKDQEERTKAIEAFREGKKDVLVATDVASKGLDFPAIQHVINYDMPEEIENYVHRIGRTGRSGNTGIATTFINKACDESVLMDLKALLLEAKQKVPPVLQVLHCGDESMLDIGGERGCAFCGGLGHRITDCPKLEAMQTKQVSNIGRKDYLAHSSMDF

SEQ ID NO: 1184 - protein, 125 aa, Homo sapiens
IETTQPSEDTNANSQDNSMQPETSSQQQLLSPTLSDRGGSRQDAADAGKPQRKFGQWRLPSAPKPISHSVSSVNLRFGGRTTMKSVVCKMNPMTDAASCGSEVKKWWTRQLTVESDESGDDLLDI

SEQ ID NO: 1185 - protein, 73 aa, Homo sapiens
NDRFSACYFTLKLKEAAVRQREALKKLTKNIATDSYISVNLRDVYARSIMEMLRLKGRERASTRSSGGDDFWF

SEQ ID NO: 1186 - protein, 343 aa, Homo sapiens
FTVFILGITIRPLVEFLDVKRSNKKQQAVSEEIYCRLFDHVKTGIEDVCGHWGHNFWRDKFKKFDDKYLRKLLIRENQPKSSIVSLYKKLEIKHAIEMAETGMISTVPTFASLNDCREEKIRKVTSSETDEIRELLSRNLYQIRQRTLSYNRHSLTADTSERQAKEILIRRRHSLRESIRKDSSLNREHRASTSTSRYLSLPKNTKLPEKLQKRRTISIADGNSSDSDADAGTTVLNLQPRARRFLPEQFSKKSPQSYKMEWKNEVDVDSGRDMPSTPPTPHSREKGTQTSGLLQQPLLSKDQSGSEREDSLTEGIPPKPPPRLVWRASEPGSRKARFGSEKP

SEQ ID NO: 1187 - protein, 146 aa, Homo sapiens
HEEASGLSVWMGKQMEPLHAVPPAAITLILSLLVAVFTECTSNVATTTLFLPIFASMSRSIGLNPLYIMLPCTLSASFAFMLPVATPPNAIVFTYGHLKVADMVKTGVIMNIIGVFCVFLAVNTWGRAIFDLDHFPDWANVTHIET

SEQ ID NO: 1188 - protein, 40 aa, Homo sapiens
HELENNWLQHEKAPTEEGKKELLALSNANPSLLERHCAYL

SEQ ID NO: 1189 - protein, 62 aa, Homo sapiens
GNIIYMYMQPGARSSQDQGKFLTLFYNIVTPLLNPLIYTLRNREVKGALGRLLLGKRELGKE

SEQ ID NO: 1190 - protein, 623 aa, Homo sapiens
PLEQRSNCRVDPRVRTHTMASDTSSLVQSHTYKKREPADVPYQTGQLHPAIRVADLLQHITQMKCAEGYGFKEEYESFFEGQSAPWDSAKKDENRMKNRYGNIIAYDHSRVRLQTIEGDTNSDYINGNYIDGYHRPNHYIATQGPMQETIYDFWRMVWHENTASIIMVTNLVEVGRVKCCKYWPDDTEIYKDIKVTLIETELLAEYVIRTFAVEKRGVHEIREIRQFHFTGWPDHGVPYHATGLLGFVRQVKSKSPPSAGPLVVHCSAGAGRTGCFIVIDIMLDMAEREGVVDIYNCVRELRSRRVNMVQTEEQYVFIHDAILEACLCGDTSVPASQVRSLYYDMNKLDPQTNSSQIKEEFRTLNMVTPTLRVEDCSIALLPRNHEKNRCMDILPPDRCLPFLITIDGESSNYINAALMDSYKQPSAFIVTQHPLPNTVKDFWRLVLDYHCTSVVMLNDVDPAQLCPQYWPENGVHRHGPIQVEFVSADLEEDIISRIFRIYNAARPQDGYRMVQQFQFLGWPMYRDTPVSKRSFLKLIRQVDKWQEEYNGGEGRTVVHCLNGGGRSGTFCAISIVCEMLRHQRTVDVFHAVKTLRNNKPNMVDLLDQYKFCYEVALEYLNSG

SEQ ID NO: 1191 - protein, 86 aa, Homo sapiens
PLTYNKKYTYPWWGDALGWLLALSSMVCIPAWSLYRLGTLKGPFRERIRQLMCPAEDLPQRNPAGPSAPATPRTSLLRLTELESHC

SEQ ID NO: 1192 - protein, 109 aa, Homo sapiens
TLSESGALFSLGPPPLSLKSSSAPRPYSTLRDCLEHFAELFDLGFPNPLAERIIFETHQIHFANCSLGQPTFSDPPEDVLLAMIIAPICLIPFLITLVVWRSKDSEAQA

SEQ ID NO: 1193 - protein, 257 aa, Homo sapiens
CEEREQEKDDVDVALLPTIVEKVILPKLTVIAENMWDPFSTTQTSRMVGITLKLINGYPSVVNAENKNTQVYLKALLLRMRRTLDDDVFMPLYPKNVLENKNSGPYLFFQRQFWSSVKLLGNFLQWYGIFSNKTLQELSIDGLLNRYILMAFQNSEYGDDSIKKAQNVINCFPKQWFMNLKGERTISQLENFCRYLVHLADTIYRNSIGCSDVEKRNARENIKQIVKLLASVRALDHAMSVASDHNVKEFKSLIEGK

SEQ ID NO: 1194 - protein, 416 aa, Homo sapiens
TPFCFLCSLVFRSRVWAEPCLIDAAKEEYNGVIEEFLATGEKLFGPYVWGRYDLLFMPPSFPFGGMENPCLTFVTPCLLAGDRSLADVIIHEISHSWFGNLVTNANWGEFWLNEGFTMYAQRRISTILFGAAYTCLEAATGRALLRQHMDITGEENPLNKLRVKIEPGVDPDDTYNETPYEKGFCFVSYLAHLVGDQDQFDSFLKAYVHEFKFRSILADDFLDFYLEYFPELKKKRVDIIPGFEFDRWLNTPGWPPYLPDLSPGDSLMKPAEELAQLWAAEELDMKAIEAVAISPWKTYQLVYFLDKILQKSPLPPGNVKKLGDTYPSISNARNAELRLRWGQIVLKNDHQEDFWKVKEFLHNQGKQKYTLPLYHAMMGGSEVAQTLAKETFASTASQLHSNVVNYVQQIVAPKGS

SEQ ID NO: 1195 - protein, 295 aa, Homo sapiens
CASGSSGWRPVLWAGAFTMASAELDYTIEIPDQPCWSQKNSPSPGGKEAETRQPVVILLGWGGCKDKNLAKYSAIYHKRGCIVIRYTAPWHMVFFSESLGIPSLRVLAQKLLELLFDYEIEKEPLLFHVFSNGGVMLYRYVLELLQTRRFCRLRVVGTIFDSAPGDSNLVGALRALAAILERRAAMLRLLLLVAFALVVVLFHVLLAPITALFHTHFYDRLQDAGSRWPELYLYSRADEVVLARDIERMVEARLARRVLARSVDFVSSAHVSHLRDYPTYYTSLCVDFMRNWVRC

SEQ ID NO: 1196 - protein, 97 aa, Homo sapiens
PRVRDRLPSTGVRDRKGDKPWKESGGSVEAPRMGFTHPPGHLSGCQSSLASGETGTGSADPPGGPRPGLTRRAPVKDTPGRAPAADAAPAGPSSCLG

SEQ ID NO: 1197 - protein, 204 aa, Homo sapiens
QGRTSCIGLYTYQRRICKYRDQYNWFFLARPTTFAIIENLKYFLLKKDPSQPFYLGHTIKSGDLEYVGMEGGIVLSVESMKRLNSLLNIPEKCPEQGGMIWKISEDKQLAVCLKYAGVFAENAEDADGKDVFNTKSVGLSIKEAMTYHPNQVVEGCCSDMAVTFNGLTPNQMHVMMYGVYRLRAFGHIFNDALVFLPPNGSDND

SEQ ID NO: 1198 - protein, 238 aa, Homo sapiens
HEGKPTRGRGRGGSLSTRGRGSEVPDSAHLAPTPLFSESGCCGLRSRFLTDCKMEEGGNLGGLIKMVHLLVLSGAWGMQMWVTFVSGFLLFRSLPRHTFGLVQSKLFPFYFHISMGCAFINLCILASQHAWAQLTFWEASQLYLLFLSLTLATVNARWLEPRTTAAMWALQTVEKERGLGGEVPGSHQGPDPYRQLREKDPKYSALRQNFFRYHGLSSLCNLGCVLSNGLCLAALPWK

SEQ ID NO: 1199 - protein, 100 aa, Homo sapiens
KQLDKQLRADPSGSLPPLPPSPPPPLEAGGRPPEVPPRGPSAVPSFPSVSGDWGGPVEAGEGGQQGRGRARARPCSLPPLLPPSPVCRLSGSRAPLGCDG

SEQ ID NO: 1200 - protein, 194 aa, Homo sapiens
RNQLSSQKSVPWVPILKSLPLWAIVVAHFSYNWTFYTLLTLLPTYMKEILRFNVQENGFLSSLPYLGSWLCMILSGQAADNLRAKWNFSTLCVRRIFSLIGMIGPAVFLVAAGFIGCDYSLAVAFLTISTTLGGFCSSGFSINHLDIAPSYAGILLGITNTFATIPGMVGPVIAKSLTPDMGISLHRPGWSAVA

SEQ ID NO: 1201 - protein, 119 aa, Homo sapiens
GPSGTTHASAHSGHPGSPRGSLSRHPSSQLAGPGVEGGEGTQKPRDYIILAILSCFCPMWPVNIVAFAYAVMSRNSLQQGDVDGAQRLGRVAKLLSIVALVGGVLIIIASCVINLGVYK

SEQ ID NO: 1202 - protein, 66 aa, Homo sapiens
SLFLSFPPLSFKMTLNDAMRNKARLSITGSTGENGRVMTPEFPKAVHAVPYVSPGMGMNVSVTDLS

SEQ ID NO: 1203 - protein, 509 aa, Homo sapiens
DDVPPPAPDLYDVPPGLRRPGPGTLYDVPRERVLPPEVADGGVVDSGVYAVPPPAEREAPAEGKRLSASSTGSTRSSQSASSLEVAGPGREPLELEVAVEALARLQQGVSATVAHLLDLAGSAGATGSWRSPSEPQEPLVQDLQAAVAAVQSAVHELLEFARSAVGNAAHTSDRALHAKLSRQLQKMEDVHQTLVAHGQALDAGRGGSGATLEDLDRLVACSRAVPEDAKQLASFLHGNASLLFRRTKATAPGPEGGGTLHPNPTDKTSSIQSRPLPSPPKFTSQDSPDGQYENSEGGWMEDYDYVHLQGKEEFEKTQKELLEKGSITRQGKSQLELQQLKQFERLEQEVSRPIDHDLANWTPAQPLAPGRTGGLGPSDRQLLLFYLEQCEANLTTLTNAVDAFFTAVATNQPPKIFVAHSKFVILSAHKLVFIGDTLSRQAKAADVRSQVTHYSNLLCDLLRGIVATTKAAALQYPSPSAAQDMVERVKELGHSTQQFRRVLGQLAAA

SEQ ID NO: 1204 - protein, 453 aa, Homo sapiens
  misc_feature (1)...(453): Xaa = any amino acid or other as shown in Table 3
EMEEPQKSYVNTMDLERDEPLKSTGPQISVSEFSCHCCYDILVNPTTLNCGHSFCRHCLALWWASSKKTECPECREKWEGFPKVSILLRDAIEKLFPDAIRLRFEDIQQNNDIVQSLAAFQKYGNDQIPLAPNTGRANQQMGGGFFSGVLTALTGVAVVLLVYHWSSRESEHDLLVHKAVAKWTAEEVVLWLEQLGPWASLYRERFLSERVNGRLLLTLTEEEFSKTPYTIENSSHRRAILMELERVKALGVKPPQNLWEYKAVNPGRSLFLLYALKSSPRLSLLYLYLFDYTDTFLPFIHTICPLQEDSSGEDIVTKLLDLKEPTWKQWREFLVKYSFLPYQLIAEFAWDWLEVHYWTSRFLIINAMLLSVLELFSFWRIWSRSELKXVGFRFLRLGVAALGSVEVAGLRGVVKGERPLLYGHGAGARFPHSVLLLPVAKPLPLPLLPRGLC

SEQ ID NO: 1205 - protein, 80 aa, Homo sapiens
EKARMIYEDYISILSPKEVSLDSRVREVINRNLLDPNPHMYEDAQLQIYTLMHRDSFPRFLNSQIYKSFVESTAGSSSES

SEQ ID NO: 1206 - protein, 205 aa, Homo sapiens
LYYSQDEESKIMISDFGLSKMEGKGDVMSTACGTPGYVAPEVLAQKPYSKAVDCWSIGVIAYILLCGYPPFYDENDSKLFEQILKAEYEFDSPYWDDISDSAKDFIRNLMEKDPNKRYTCEQAARHPWIAGDTALNKNIHESVSAQIRKNFAKSKWRQAFNATAVVRHMRKLHLGSSLDSSNASVSSSLSLASQKDCASGTFHAL

SEQ ID NO: 1207 - protein, 117 aa, Homo sapiens
RTRGGAVSFEDFIKGLSILLRGTVQEKLNWAFNLYDINKDGYITKEEMLDIMKAIYDMMGKCTYPVLKEDAPRQHVETFFQKMDKNKDGVVTIDEFIESCQKDENIMRSMQLFENVI

SEQ ID NO: 1208 - protein, 337 aa, Homo sapiens
PRSPEHHTPAWHEGRSLGPIMASMADRNMKLFSGRVVPAQGEETFENWLTQVNGVLPDWNMSEEEKLKRLMKTLRGPAREVMRVLQATNPNLSVADFLRAMKLVFGESESSVTAHGKFFNTLQAQGEKASLYVIRLEVQLQNAIQAGIIAEKDANRTRLQQLLLGGELSRDLRLRLKDFLRMYANEQERLPNFLELIKMVREEEDWDDAFIKRKRPKRSESMVERAVSPVAFQGSPPIVIGSADCNVIEIDDTLDDSDEDVILVESQDPPLPSWGAPPLRDRARPQDEVLVIDSPHNSRAQFPSTSGGSGYKNNGPGEMRRARKRKHTIRCSYCGEE

SEQ ID NO: 1209 - protein, 64 aa, Homo sapiens
SVACTVPLRSMSDPDQDFDKEPDSDSTKHSTPSNSSNPSGPPSPNSPHRSQLPLEGLEQPACDT

SEQ ID NO: 1210 - protein, 316 aa, Homo sapiens
YSAVEFAERGSGGSSGDELREDDEPVKKRGRKGRGRGPPSSSDSEPEAELEREAKKSAKKPQSSSTEPARKPGQKEKRVRPEEKQQAKPVKVERTRKRSEGFSMDRKVEKKKEPSVEEKLQKLHSEIKFALKVDSPDVKRCLNALEELGTLQVTSQILQKNTDVVATLKKIRRYKANKDVMEKAAEVYTRLKSRVLGPKIEAVQKVNKAGMEKEKAEEKLAGEELAGEEAPQEKAEDKPSTDLSAPVNGEATSQKGESAEDKEHEEGRDSEEGPRCGSSEDLHDSVREGPDLDRPGSDRQERERARGDSEALDEES

SEQ ID NO: 1211 - protein, 767 aa, Homo sapiens
LAELSSLSVLRLSHNSISHIAEGAFKGLRSLRVLDLDHNEISGTIEDTSGAFSGLDSLSKLTLFGNKIKSVAKRAFSGLEGLEHLNLGGNAIRSVQFDAFVKMKNLKELHISSDSFLCDCQLKWLPPWLIGRMLQAFVTATCAHPESLKGQSIFSVPPESFVCDDFLKPQIITQPETTMAMVGKDIRFTCSAASSSSSPMTFAWKKDNEVLTNADMENFVHVHAQDGEVMEYTTILHLRQVTFGHEGRYQCVITNHFGSTYSHKARLTVNVLPSFTKTPHDITIRTTTMARLECAATGHPNPQIAWQKDGGTDFPAARERRMHVMPDDDVFFITDVKIDDAGVYSCTAQNSAGSISANATLTVLETPSLVVPLEDRVVSVGETVALQCKATGNPPPRITWFKGDRPLSLTERHHLTPDNQLLVVQNVVAEDAGRYTCEMSNTLGTERAHSQLSVLPAAGCRKDGTTVGIFTIAVVSSIVLTSLVWVCIIYQTRKKSEEYSVTNTDETVVPPDVPSYLSSQGTLSDRQETVVRTEGGPQANGHIESNGVCPRDASHFPEPDTHSVACRQPKLCAGSAYHKKPWKAMEKAEGTPGPHKMEHGGRVVCSDCNTEVDCYSRGQAFHPQPVSRDSAQPSAPNGPEPGGSDQEHSPHHQCSRTAAGSCPECQGSLYPSNHDRMLTAVKKKPMASLDGKGDSSWTLARLYHPDSTELQPASSLTSGSPERAEAQYLLVSNGHLPKACDASPESTPLTGQLPGKQRVPLLLAPKS

SEQ ID NO: 1212 - protein, 821 aa, Homo sapiens
AAAGAARRVSVRCGRSGPGPGRGAAGLSPADIALASEQGASCSVRAPERKLRMKLLWQAKMSSIQDWGEEVEEGAVYHVTLKRVQIQQAANKGARWLGVEGDQLPPGHTVSQYETCKIRTIKAGTLEKLVENLLTAFGDNDFTYISIFLSTYRGFASTKEVLELLLDRYGNLTSPNCEEDGSQSSSESKMVIRNAIASILRAWLDQCAEDFREPPHFPCLQKLLDYLTRMMPGSDPERRAQNLLEQFQKQEVETDNGLPNTISFSLEEEEELEGGESAEFTCFSEDLVAEQLTYMDAQLFKKVVPHHCLGCIWSRRDKKENKHLAPTIRATISQFNTLTKCVVSTILGGKELKTQQRAKIIEKWINIAHECRLLKNFSSLRAIVSALQSNSIYRLKKTWAAVPRDRMLMFEELSDIFSDHNNHLTSRELLMKEGTSKFANLDSSVKENQKRTQRRLQLQKDMGVMQGTVPYLGTFLTDLTMLDTALQDYIEGGLINFEKRRREFEVIAQIKLLQSACNSYCMTPDQKFIQWFQRQQLLTEEESYALSCEIEAAADASTTSPKPWKSMVKRLNLLFLGADMITSPTPTKEQPKSTASGSSGESMDSVSVSSCESNHSEAEEGYITPMDTPDEPQKKLSESSSYCSSIHSMDTNFLQGMSSLINPLSSPPSCNNNPKIHKRSVSVTSITSTVLPPVYNQQNEDTCIIRISVEDNNGNMYKSIMLTSQDKTPAVIQRAMLKHNLDSDPAEEYELVQVISEDKELVIPDSANVFYAMNSQVNFDFILRKKNSMEEQVKLRSRTSLTLPRTAKRGCWSNRHSKITL

SEQ ID NO: 1213 - protein, 289 aa, Homo sapiens
AREKMDSCIEAFGTTKQKRALNTRRMNRVGNESLNRAVAKAAETIIDTKGVTALVSDAIHNDLQDDSLYLPPCYDDAAKPEDVYKFEDLLSPAEYEALQSPSEAFRNVTSEEILKMIEENSHCTFVIEALKSLPSDVESRDRQARCIWFLDTLIKFRAHRVVKRKSALGPGVPHIINTKLLKHFTCLTYNNGRLRNLISDSMKAKITAYVIILALHIHDFQIDLTVLQRDLKLSEKRMMEIAKAMRLKISKRRVSVAAGSEEDHKLGTLSLPLPPAQTSDRLAKRRKIT

SEQ ID NO: 1214 - protein, 873 aa, Homo sapiens
LSLFGSRALGRSGARAMAKAKKVGARRKASGAPAGARGGPAKANSNPFEVKVNRQKFQILGRKTRHDVGLPGVSRARALRKRTQTLLKEYKERDKSNVFRDKRFGEYNSNMSPEEKMMKRFALEQQRHHEKKSIYNLNEDEELTHYGQSLADIEKHNDIVDSDSDAEDRGTLSGELTAAHFGGGGGLLHKKTQQEGEEREKPKSRKELIEELIAKSKQEKRERQAQREDALELTEKLDQDWKEIQTLLSHKTPKSENRDKKEKPKPDAYDMMVRELGFEMKAQPSNRMKTEAELAKEEQEHLRKLEAERLRRMLGKDEDENVKKPKHMSADDLNDGFVLDKDDRRLLSYKDGKMNVEEDVQEEQSKEASDPESNEEEGDSSGGEDTEESDSPDSHLDLESNVESEEENEKPAKEQRQTPGKGLISGKERAGKATRDELPYTFAAPESYEELRSLLLGRSMEEQLLVVERIQKCNHPSLAEGNKAKLEKLFGFLLEYVGDLATDDPPDLTVIDKLVVHLYHLCQMFPESASDAIKFVLRDAMHEMEEMIETKGRAALPGLDVLIYLKITGLLFPTSDFWHPVVTPALVCLSQLLTKCPILSLQDVVKGLFVCCLFLEYVALSQRFIPELINFLLGILYIATPNKASQGSTLVHPFRALGKNSELLVVSAREDVATWQQSSLSLRWASRLRAPTSTEANHIRLSCLAVGLALLKRCVLMYGSLPSFHAIMGPLRALLTDHLADCSHPQELQELCQSTLTEMESQKQLCRPLTCEKSKPVPLKLFTPRLVKVLEFGRKQGSSKEEQERKRLIHKHKREFKGAVREIRKDNQFLARMQLSEIMERDAERKRKVKQLFNSLATQEGEWKALKRKKFKK

SEQ ID NO: 1215 - protein, 319 aa, Homo sapiens
LTKQEDCCGSIGTAWGQSKCHKCPQLQYTGVQKPGPVRGEVGADCPQGYKRLNSTHCQDINECAMPGVCRHGDCLNNPGSYRCVCPPGHSLGPSRTQCIADKPEEKSLCFRLVSPEHQCQHPLTTRLTRQLCCCSVGKAWGARCQRCPTDGTAAFKEICPAGKGYHILTSHQTLTIQGESDFSLFLHPDGPPKPQQLPESPSQAPPPEDTEEERGVTTDSPVSEERSVQQSHPTATTTPARPYPELISRPSPPTMRWFLPDLPPSRSAVEIAPTQVTETDECRLNQNICGHGECVPGPPDYSCHCNPGYRSHPQHRYCV

SEQ ID NO: 1216 - protein, 815 aa, Homo sapiens
MAGGHCGSFPAAAAGSGEIVQLNVGGTRFSTSRQTLMWIPDSFFSSLLSGRISTLRDETGAIFIDRDPAAFAPILNFLRTKELDLRGVSINVLRHEAEFYGITPLVRRLLLCEELERSSCGSVLFHGYLPPPGIPSRKINNTVRSADSRNGLNSTEGEARGNGTQPVLSGTGEETVRLGFPVDPRKVLIVAGHHNWIVAAYAHFAVWYRIKESSGWQQVFTSPYLDWTIERVALNAKVVGGPHGDKDKMVAVASESSIILWSVQDGGSGSEIGVFSLGVPVDALFFIGNQLVATSHTGKVGVWNAVTQHWQVQDVVPITSYDTAGSFLLLGCNNGSIYYIDMQKFPLRMKDNDLLVTELYHDPSNDAITALSVYLTPKTSVSGNWIEIAYGTSSGAVRVIVQHPETVGSGPQLFQTFTVHRSPVTKIMLSEKHLVSVCADNNHVRTWTVTRFRGMISTQPGSTPLASFKILSLEETESHGSYSSGNDIGPFGERDDQQVFIQKVVPITNKLFVRLSSTGKRICEIQAVDCTTISSFTGRECEGSSRMGSRPRRYLFTGHTNGSIQMWDLTTAMDMVNKSEDKDVGGPTEEELLKLLDQCDLSTSRCATPNISPATSVVQHSHLRESNSSLQLQHHDTTHEAATYGSMRPYRESPLLARARRTESFHSYRDFQTINLNRNVERAVPENGNLGPIQAEVKGATGECNISERKSPGVEIKSLRELDSGLEVHKIAEGFSESKKRSSEDENENKIEFRKKGGFEGGGFLGRKKVPYLASSPSTSDGGTDSPGTASPSPTKTTPSPRHKKSDSSGQEYSL

SEQ ID NO: 1217 - protein, 459 aa, Homo sapiens
RRPTRPILTDELFKRTIQLPHLKTLILNGNKLETLSLVSCFANNTPLEHLDLSQNLLQHKNDENCSWPETVVNMNLSYNKLSDSVFRCLPKSIQILDLNNNQIQTVPKETIHLMALRELNIAFNFLTDLPGCSHFSRLSVLNIEMNFILSPSLDFVQSCQEVKTLNAGRNPFRCTCELKNFIQLETYSEVMMVGWSDSYTCEYPLNLRGTRLKDVHLHELSCNTALLIVTIVVIMLVLGLAVAFCCLHFDLPWYLRMLGQCTQTWHRVRKTTQEQLKRNVRFHAFISYSEHDSLWVKNELIPNLEKEDGSILICLYESYFDPGKSISENIVSFIEKSYKSIFVLSPNFVQNEWCHYEFYFAHHNLFHENSDHIILILLEPIPFYCIPTRYHKLKALLEKKAYLEWPKDRRKCGLFWANLRAAINVNVLATREMYELQTFTELNEESRGSTISLMRTDCL

SEQ ID NO: 1218 - protein, 366 aa, Homo sapiens
PTRPPTRPPTRPLLTPSWTSTGRMWSHLNRLLFWSIFSSVTCRKAVLDCEAMKTNEFPSPCLDSKTKVVMKGQNVSMFCSHKNKSLQITYSLFRRKTHLGTQDGKGEPAIFNLSITEAHESGPYKCKAQVTSCSKYSRDFSFTIVDPVTSPVLNIMVIQTETDRHITLHCLSVNGSLPINYTFFENHVAISPAISKYDREPAEFNLTKKNPGEEEEYRCEAKNRLPNYATYSHPVTMPSTGGDSCPFCLKLLLPGLLLLLVVIILILAFWVLPKYKTRKAMRNNVPRDRGDTAMEVGIYANILEKQAKEESVPEVGSRPCVSTAQDEAKHSQELQYATPVFQEVAPREQEACDSYKSGYVYSELNF

SEQ ID NO: 1219 - protein, 97 aa, Homo sapiens
FFFFEERRTGSHSVGHPRMEYSGVSMAHCSLNLLGSSNSPSSASQDARTTGACQHAQLIGFFFFVETASPQVTHAGLKHLVSRNPSAVTSQSARIKT

SEQ ID NO: 1220 - protein, 242 aa, Homo sapiens
NREGARKIQNKWLRPSPRSHRTPESVSPERYSYGTSSSSKRTEGSCRRRRQSSSSANSQQGQWETGSPPTKRQRRSRGRPSGGAKRRRRGAPAAPQQQSEPARPSSEGKVTCDIRLRVRAEYCEHGPALEQGVASRRPQALARQLDVFGQATAVLRSRDLGSVVCDIKFSELSYLDAFWGDYLSGALLQALRGVFLTEALREAVGREAVRLLVSVDEADYEAGRRRLLLMEEEGGRRPTEAS

SEQ ID NO: 1221 - protein, 440 aa, Homo sapiens
APNTAELRICRVNKNCGSVRGGDEIFLLCDKVQKDDIEVRFVLNDWEAKGIFSQADVHRQVAIVFKTPPYCKAITEPVTVKMQLRRPSDQEVSESMDFRYLPDEKDTYGNKAKKQKTTLLFQKLCQDHVETGFRHVDQDGLELLTSGDPPTLASQSAGITVNFPERPRPGLLGSIGEGRYFKKEPNLFSHDAVVREMPTGVSSQAESYYPSPGPISSGLSHHASMAPLPSSSWSSVAHPTPRSGNTNPLSSFSTRTLPSNSQGIPPFLRIPVGNDLNASNACIYNNADDIVGMEASSMPSADLYGISDPNMLSNCSVNMMTTSSDSMGETDNPRLLSMNLENPSCNSVLDPRDLRQLHQMSSSSMSAGANSNTTVFVSQSDAFEGSDFSCADNSMINESGPSNSTNPNSHGFVQDSQYSGIGSMQNEQLSDSFPYEFFQV

SEQ ID NO: 1222 - protein, 437 aa, Homo sapiens
RRLSLLDLQLGPLGRDPPQECSTFSPTDSGEEPGQLSPGVQFQRRQNQRRFSMEDVSKRLSLPMDIRLPQEFLQKLQMESPDLPKPLSRMSRRASLSDIGFGKLETYVKLDKLGEGTYATVFKGRSKLTENLVALKEIRLEHEEGAPCTAIREVSLLKNLKHANIVTLHDLIHTDRSLTLVFEYLDSDLKQYLDHCGNLMSMHNVKIFMFQLLRGLAYCHHRKILHRDLKPQNLLINERGELKLADFGLARAKSVPTKTYSNEVVTLWYRPPDVLLGSTEYSTPIDMWGVGCIHYEMATGRPLFPGSTVKEELHKINRLLGTPTEETWPGVTAFSEFRTYSFPCYLPQPLINHAPRLDTDGIHLLSSLLLYESKSRMSAEAALSHSYFRSLGERVHQLEDTASIFSLKEIQLQKDPGYRGLAFQQPGRGKNRRQSIF

SEQ ID NO: 1223 - protein, 150 aa, Homo sapiens
CTPHGSSSSWKIPLWPRHMSPLHSCLPVGTSTSSGPLAVPRDCFHLCCLWGQLLLISCPLACGQGCRVAGGQQHVPGQALGTLSPLVSLLTWAGPSLDWPHPGSLVTPRCPILPAVPVLVKGLGGWPPTRPSRAAPVSGPWDQLPYFPGL

SEQ ID NO: 1224 - protein, 276 aa, Homo sapiens
LISPVWGNIQRSRSVPLFPSGLVLGGIWARGPLLALLASFNIISVLNAECYLKQILHPTSHFTVSETPPLSGNDTDSLSCDSGSSATSTPCVSRLVTGHHLWASKNGRHVLGLIEDYEALLKQISQGQRLLAEMDIQTQEAPSSTSQELGTKGPHPAPLSKFVSSVSTAKLTLEEAYRRLKLLWRVSLPEDGQCPLHCEQIGEMKAEVTKLHKKLFEQEKKLQNTMKLLQLSKRQEKVIFDQLVVTHKILRKARGNLELRPGGAHPGTCSPSRPGS

SEQ ID NO: 1225 - protein, 270 aa, Homo sapiens
LGLFCILPIDTLCAVLERDTLSIRESRLFGAVVRWAEAECQRQQLPVTFGNKQKVLGKALSLIRFPLMTIEEFAAGPAQSGILSDREVVNLFLHFTVNPKPRVEYIDRPRCCLRGKECCINRFQQVESRWGYSGTSDRIRFTVNRRISIVGFGLYGSIHGPTDYQVNIQIIEYEKKQTLGQNDTGFSCDGTANTFRVMFKEPIEILPNVCYTACATLKGPDSHYGTKGLKKVVHETPAASKTVFFFFSSPGNNNGTSIEDGQIPEIIFYT

SEQ ID NO: 1226 - protein, 273 aa, Homo sapiens
SVWWNSEVKDWMQKKRRGLRNSRATAGDIAHYYRDYVVKKGLGHNFVSGAVVTAVEWGTPDPSSCGAQDSSPLFQVSGFLTRNQAQQPFSLWARNVVLATGTFDSPARLGIPGEALPFIHHELSALEAATRVGAVTPASDPVLIIGAGLSAADAVLYARHYNIPVIHAFRRAVDDPGLVFNQLPKMLYPEYHKVHQMMREQSILSPSPYEGYRSLPRHQLLCFKEDCQAVFQDLEGVEKVFGVSLVLVLIGSHPDLSFLPGAGLTLQWILTSR

SEQ ID NO: 1227 - protein, 86 aa, Homo sapiens
KLRPFIFSNQSLWLHSYEGAELEKTFIKGSWATFWVKVASCWACVLLYLGLLLAPLCWPPTQKPQPLILRRRRHRIISPDNKYPPV

SEQ ID NO: 1228 - protein, 249 aa, Homo sapiens
QLIHLSHGYQIHWTDYYNVGTGRPEFGTRAAHKSLAGAELKTLKDFVTVLAKLFPGRPPVKKLLEMLQEWLASLPLDRIPYNAVLDLVNNKMRISGIFLTNHIKWVGCQGSRSELRGYPCSLWKLFHTLTVEASTHPDALVGTGFEDDPQAVLQTMRRYVHTFFGCKECGEHFEEMAKESMDSVKTPDQAILWLWKKHNMVNGRLAGEKPLGMGGSARAEGGPGPGTARTARLPWGLSLSFAASCHPLC

SEQ ID NO: 1229 - protein, 800 aa, Homo sapiens
HGGATFINAFVTTPMCCPSRSSMLTGKYVHNHNVYTNNENCSSPSWQAMHEPRTFAVYLNNTGYRTAFFGKYLNEYNGSYIPPGWREWLGLIKNSRFYNYTVCRNGIKEKHGFDYAKDYFTDLITNESINYFKMSKRMYPHRPVMMVISHAEPHGPEDSAPQFSKLYPNASQHITPSYNYAPNMDKHWIMQYTGPMLPIHMEFTNILQRKRLQTLMSVDDSVERLYNMLVETGELENTYIIYTADHGYHIGQFGLVKGKSMPYDFDIRVPFFIRGPSVEPGSIVPQIVLNIDLAPTILDIAGLDTPPDVDGKSVLKLLDPEKPGNRFRTNKKAKIWRDTFLVERGKFLRKKEESSKNIQQSNHLPKYERVKELCQQARYQTACEQPGQKWQCIEDTSGKLRIHKCKGPSDLLTVRQSTRNLYARGFHDKDKECSCRESGYRASRSQRKSQRQFLRNQGTPKYKPRFVHTRQTRSLSVEFEGEIYDINLEEEEELQVLQPRNIAKRHDEGHKGPRDLQASSGGNRGRMLADSSNAVGPPTTVRVTHKCFILPNDSIHCERELYQSARAWKDHKAYIDEEIEALQDKIKNLREVRGHLKRRKPEECSCSKQSYYNKEKGVKKQEKLKSHLHPFKEAAQEVDSKLQLFKENNRRRKKERKEKRRQRKGEECSLPGLTCFTHDNNHWQTAPFWNLGSFCACTSSNNNTYWCLRTVNETHNFLFCEFATGFLEYFDMNTDPYQLTNTVHTVERGILNQLHVQLMELRSCQGYKQCNPRPKNLDVGNKDGGSYDLHRGQLWDGWEG

SEQ ID NO: 1230 - protein, 698 aa, Homo sapiens
HLLIAQELADRVGEGRACWSLGNAYVSMGRPAQALTFAKKHLQISQEIGDRHGELTARMNVAQLQLVLGRLTSPAASEKPDLAGYEAQGARPKRTQRLSAETWDLLRLPLEREQNGDSHHSGDWRGPSRDSLPLPVRSRKYQEGPDAERRPREGSHSPLDSADVRVHVPRTSIPRAPSSDEECFFDLLTKFQSSRMDDQRCPLDDGQAGAAEATAAPTLEDRIAQPSMTASPQTEEFFDLIASSQSRRLDDQRASVGSLPGLRITHSNAGHLRGHGEPQEPGDDFFNMLIKYQSSRIDDQRCPPPDVLPRGPTMPDEDFFSLIQRVQAKRMDEQRVDLAGGPGAGGRRPARAPAAVPAWCELRPCAHRQAHPAPTPGRRSHSHSHVLPRPLPRTGTGHAAPRPPRPRATGSGQAARGGRACFHPGLAPMALSFLPSAPAAGRTGPSACRPRPGAVRLPHPLPQALPVLPCPAKCETLLSPSPSPKVSLSRLLGPPRTGPCSVPPELVLGWPCDRHAPPLQLRPGAGLPPSLSPHSPARGQQPQKAPQTTHGRPGCSGSPEVPPAESQGPAGASTGAGPISKAEGMAGHELRHSKTPSQEKGQGLVLGMLTGSKSSAQSGWEVAPGSVTLTQVGGWSVEAGEASLSSTLQTPHMRTPLLPPAGGDDITALSMGRGLTGHQVRDPRTGRTCWSLRWAPGA

SEQ ID NO: 1231 - protein, 131 aa, Homo sapiens
NSAADLAIFALWGLKPVVYLLASSFLGLGLHPISGHFVAEHYMFLKGHETYSYYGPLNWITFNVGYHVEHHDFPSIPGYNLPLVRKIAPEYYDHLPQHHSWVKVLWDFVFEDSLGPYARVKRVYRLAKDGL

SEQ ID NO: 1232 - protein, 71 aa, Homo sapiens
QESGFSCKGPGQNVAVTRAHPDSQGRRRRPERGARGGQVFYNSEYGELSEPSEEDHCSPSARVTFFTDNSY

SEQ ID NO: 1233 - protein, 146 aa, Homo sapiens
VIVHARPIRTRASKYYIPEAVYGLPAYPAYAGGGGFVLSGATLHRLAGACAQVELFPIDDVFLGMCLQRLRLTPEPHPAFRTFGIPQPSAAPHLSTFDPCFYRELVVVHGLSAADIWLMWRLLHGPHGPACAHPQPVAAGPFQWDS

SEQ ID NO: 1234 - protein, 299 aa, Homo sapiens
MASAACSMDPIDSFELLDLLFDRQDGILRHVELGEGWGHVKDQVLPNPDSDDFLSSILGSGDSLPSSPLWSPEGSDSGISEDLPSDPQDTPPRSGPATSPAGCHPAQPGKGPCLSYHPGNSCSTTTPGPVIQQQHHLGASYLLRPGAGHCQELVLTEDEKKLLAKEGITLPTQLPLTKYEERVLKKIRRKIRNKQSAQESRKKKKEYIDGLETRSCCCPLPSSSSPPSALLAPTKPRALGTLRLYECSPELCTTMLPPAWLLMLCQAPRPQDPDPRLTQPEKSLQEAPGQTGASRTPRT

SEQ ID NO: 1235 - protein, 1098 aa, Homo sapiens
ARGRRSRPVWAASWGGRGRPAARRRPRGLAATMGFELDRFDGDVDPDLKCALCHKVLEDPLTTPCGHVFCAGCVLPWVVQEGSCPARCRGRLSAKELNHVLPLKRLILKLDIKCAYATRGCGRVVKLQQLPEHLERCDFAPARCRHAGCGQVLLRRDVEAHMRDACDARPVGRCQEGCGLPLTHGEQRAGGHCCARALRAHNGALQARLGALHKALKKEALRAGKREKSLVAQLAAAQLELQMTALRYQKKFTEYSARLDSLSRCVAAPPGGKGEETKSLTLVLHRDSGSLGFNIIGGRPSVDNHDGSSSEGIFVSKIVDSGPAAKEGGLQIHDRIIEVNGRDLSRATHDQAVEAFKTAKEPIVVQVLRRTPRTKMFTPPSESQLVDTGTQTDITFEHIMALTKMSSPSPPVLDPYLLPEEHPSAHEYYDPNDYIGDIHQEMDREELELEEVDLYRMNSQDKLGLTVCYRTDDEDDIGIYISEIDPNSIAAKDGRIREGDRIIQINGIEVQNREEAVALLTSEENKNFSLLIARAELQLDEGWMDDDRNDFLDDLHMDMLEEQHHQAMQFTASVLQQKKHDEDGGTTDTATILSNQHEKDSGVGRTDESTRNDESSEQENNGDDATASSNPLAGQRKLTCSQDTLGSGDLPFSNKSFISPECTGAAYLGIPVDECERFRELLELKCQVKSATPYGLYYPSGPLDAGKSDPESVDKELELLNEELRSIELECLSIVRAHKMQQLKEQYRESWMLHNSGFRNYNTSIDVRRHELSDITELPEKSDKDSSSAYNTGESCRSTPLTLEISPDNSLRRAAEGISCPSSEGAVGTTEAYGPASKNLLSITEDPEVGTPTYSPSLKELDPNQPLESKERRASDGSRSPTPSQKLGSAYLPSYHHSPYKHAHIPAHAQHYQSYMQLIQQKSAVEYAQSQMSLVSMCKDLSSPTPSEPRMEWKVKIRSDGTRYITKRPVRDRLLRERALKIREERSGMTTDDDAVSEMKMGRYWSKEERKQHLVKAKEQRRRREFMMQSRLDCLKEQQAADDRKEMNILELSHKKMMKKRNKKIFDNWMTIQELLTHGTKSPDGTRVYNSFLSVTTV

SEQ ID NO: 1236 - protein, 51 aa, Homo sapiens
FFFLVEMGFCHVGQGGLTLIGSSNLPASASKSAGITGVSHCARPDFKSCVE

SEQ ID NO: 1237 - protein, 70 aa, Homo sapiens
LAGRKVLLFVSGYVVGWGPITWLLMSEVLPLRARGVASGLCVLASWLTAFVLTKSFLPGGVSVQPQAPGP

SEQ ID NO: 1238 - protein, 114 aa, Homo sapiens
FWAPGPPGVGAAVGDASTRSLRESCPSPSPGRLRRTTAPWSSQARAAAPAPSSSCRGPDGASSPRDLPWRPWKILRRTPLSGDVELSQVHPDQRILRRFILSRTCGNTIPGMAE

SEQ ID NO: 1239 - protein, 174 aa, Homo sapiens
MRRFLSKVYSFPMRKLILFLVFPVVRQTPTQHFKNQFPALHWEHELGLAFTKNRMNYTNKFLLIPESGDYFIYSQVTFRGMTSECSEIRQAGRPNKPDSITVVITKVTDSYPEPTQLLMGTKSVCEVGSNWFQPIYLGAMFSLQEGDKLMVNVSDISLVDYTKEDKTFFGAFLL

SEQ ID NO: 1240 - protein, 425 aa, Homo sapiens
FVWDEVAQRSGCEERWLVIDRKVYNISEFTRRHPGGSRVISHYAGQDATDPFVAFHINKGLVKKYMNSLLIGELSPEQPSFEPTKNKELTDEFRELRATVERMGLMKANHVFFLLYLLHILLLDGAAWLTLWVFGTSFLPFLLCAVLLSAVQAQAGWLQHDFGHLSVFSTSKWNHLLHHFVIGHLKGAPASWWNHMHFQHHAKPNCFRKDPDINMHPFFFALGKILSVELGKQKKKYMPYNHQHKYFFLIGPPALLPLYFQWYIFYFVIQRKKWVDLAWMITFYVRFFLTYVPLLGLKAFLGLFFIVRFLESNWFVWVTQMNHIPMHIDHDRNMDWVSTQLQATCNVHKSAFNDWFSGHLNFQIEHHLFPTMPRHNYHKVAPLVQSLCAKHGIEYQSKPLLSAFADIIHSLKESGQLWLDAYLHQ

SEQ ID NO: 1241 - protein, 152 aa, Homo sapiens
QCGGIPYNTTQFLMNDRDPEEPNLDVPHGISHPGSSGESEAGDSDGRGRAHGEFQRKDFSETYERFHTESLQGRSKQELVRDYLELEKRLSQAEEETRRLQQLQACTGQQSCRQVEELAAEVQRLRTENQRLRQENQMWNREGCRCDEEPGT

SEQ ID NO: 1242 - protein, 191 aa, Homo sapiens
SPERSSLSVGREKAMEVPPPAPRSFLCRALCLFPRVFAAEAVTADSEVLEERQKRLPYVPEPYYPESGWDRLRELFGKDVTGSLFRINVGLRGLVAGGIIGALLGTPVGGLLMAFQKYSGETVQERKQKDRKALHELKLEEWKGRLQVTEHLPEKIESSLQEDEPENDAKKIEALLNLPRNPSVIDKQDKD

SEQ ID NO: 1243 - protein, 381 aa, Homo sapiens
RSLGLAVTEMVPWVRTMGQKLKQRLRLDVGREICRQYPLFCFLLLCLSAASLLLNRYIHILMIFWSFVAGVVTFYCSLGPDSLLPNIFFTIKYKPKQLGLQELFPQGHSCAVCGKVKCKRHRPSLLLENYQPWLDLKISSKVDASLSEVLELVLENFVYPWYRDVTDDESFVDELRITLRFFASVLIRRIHKVDIPSIITKKLLKAAMKHIEVIVKARQKVKNTEFLQQAALEEYGPELHVALRSRRDELHYLRKLTELLFPYILPPKATDCRSLTLLIREILSGSVFLPSLDFLADPDTVNHLLIIFIDDSPPEKATEPASPLVPFLQKFAEPRNKKPSVLKLELKQIREQQDLLFRFMNFLKQEGAVHVLHVLFDCGGI

SEQ ID NO: 1244 - protein, 371 aa, Homo sapiens
QSLAEVLQQLGASSELQAVLSYIFPTYGVTPNHSAFSMHALLVNHYMKGGFYPRGVTSEIAFHTIPVIQRAGGAVLTKATVQSVLLDSAGKACGVSVKKGHELVNIYCPIVVSNAGLFNTYEHLLPGNARCLPGVKQQLGTVRPGLGMTSVFICLRGTKEDLHLPSTNYYVYYDTDMDQAMERYVSMPREEAAEHIPLLFFAFPSAKDPTWEDRFPGRSTMIMLIPTAYEWFEEWQAELKGKRGSDYETFKNSFVEASMSVVLKLFPQLEGKVESVTAGSPLTNQFYLAAPRGACYGADHDLGRLHPCVMASLRAQSPIPNLYLTGQDIFTCGLVGALQGALLCSSTILKRNLYSDLKNLDSRIRAQKKKN

SEQ ID NO: 1245 - protein, 295 aa, Homo sapiens
RPQETRVLQVSCGRAHSLVLTDREGVFSMGNNSYGQCGRKVVENEIYSESHRVHRMQDFDGQVVQVACGQDHSLFLTDKGEVYSCGWGADGQTGLGHYNITSSPTKLGGDLAGVNVIQVATYGDCCLAVSADGGLFGWGNSEYLQLASVTDSTQVNVPRCLHFSGVGKVRQAACGGTGCAVLNGEGHVFVWGYGILGKGPNLVESAVPEMIPPTLFGLTEFNPEIQVSRIRCGLSHFAALTNKGELFVWGKNIRGCLGIGRLEDQYFPWRVTMPGEPVDVACGVDHMVTLAKSFI

SEQ ID NO: 1246 - protein, 172 aa, Homo sapiens
LPFREWLMIVVSLSAAAVAAAFMAKCRMVLSSRYFCSHFVMSASRARIRSSFSRTSSRRAGALYSGMLAGWPFPCFCWVLSASSSLSSQVRSLRSICSRFSHADCSWVRACCSFSTFSTYACFSRNSSSSLMTLAWALLKAWSRISMCLRWSSLAVRTAANSISNFSFSFKN

SEQ ID NO: 1247 - protein, 361 aa, Homo sapiens
MQAVRATASQSLSCARAPREPTQHALRAHWFPPAAAVQPSPHSGVAAAAGTWSSAFRGEHPLVSSGLLLGVREQSFRLLRSKAGTHMYLEHTSHCPHHDDDTAMDTPLPRPRPLLAVERTGQRPLWAPSLELPKPDMQPLPAGAFLEEVAEGTPAQTESEPKVLDPEEDLLCIAKTFSYLRESGWYWGSITASEARQHLQKMPEGTFLVRDSTHPSYLFTLSVKTTRGPTNVRIEYADSSFRLDSNCLSRPRILAFPDVVSLVQHYVASCTADTRSDSPDPAPTPALPMPKEDAPSDPALPAPPPATAVHLKLVQPFVRRSSARSLQHLCRLVINRLVADVDCLPLPRRMADYLRQYPFQL

SEQ ID NO: 1248 - protein, 279 aa, Homo sapiens
FVDIFQRWKECRGKSPAQAELSYLNKAKWLEMYGVDMHVVRGRDGCEYSLGLTPTGILIFEGANKIGLFFWPKITKMDFKKSKLTLVVVEDDDQGREQEHTFVFRLDSARTCKHLWKCAVEHHAFFRLRTPGNSKSNRSDFIRLGSRFRFSGRTEYQATHGSRLRRTSTFERKPSKRYPSRRHSTFKASNPVIAAQLCSKTNPEVHNYQPQYHPNIHPSQPRWHPHSPNVRPSFQDDRSHWKASASGDDSHFDYVHDQNQKNLGGMQSMMYRDKLMTAL

SEQ ID NO: 1249 - protein, 255 aa, Homo sapiens
  misc_feature (1)...(255): Xaa = any amino acid or other as shown in Table 3
GGIRLIQKLTWRSRQQDRENCAMKGKHKDECHNFIKVFVPRNDEMVFVCGTNAFNPMCRYYRVSIFYVICFFXSTFLPSLICCXSXNLSAFQXFVLSLVQXKNKDRILQMEFXYKXNSIAFKRARXIDMTLAIYFSFVLSTLXYDGEEISGLARCPFDARQTNGALFADGKLYSATVADFLASDAVIYRSMGDGSALRTIKYDSKWIKEPHFLYAIKYGNYVYFSFREIVATXXLGKAVDSRVARYEKQLVGPTV

SEQ ID NO: 1250 - protein, 307 aa, Homo sapiens
ARALARERESESARADDVTLGVSAILAVDRGGNLGSADGWAYIDVEVRRPWAFVGPGCSRSSGNGSTAYGLVGSPRWLSPFHTGGAVSLPRRPRGPGPVLGVARPCLRCVLRPEHYEPGSHYSGFAGRDASRAFVTGDCSEAGLVDDVSDLSAAEMLTLHNWLSFYEKNYVCVGRVTGRFYGEDGLPTPALTQVEAAITRGLEANKLQLQEKQTFPPCNAEWSSARGSRLWCSQKSGGVSRDWIGVPRKLYKPGAKEPRCVCVRTTGPPSGQMPDNPPHRNRGDLDHPNLAEYTGCPPLAITCSFPL

SEQ ID NO: 1251 - protein, 100 aa, Homo sapiens
YFIICRDGVLLFCPGWSQTPGAQAILLHWATQNAGMTDMSHSAQPIYLFIYLIRTRSHYVAQAGQLLDSNDSPNVASQNVGITGMSHHAWLKIVLYFCII

SEQ ID NO: 1252 - protein, 464 aa, Homo sapiens
PAARPPSLVRLSPSPPKPRARARAPQSVEPAAPLVARGSSPPARPAPAMVRPRRAPYRSGAGGPLGGRGRPPRPLVVRAVRSRSWPASPRGPQPPRIRARSAPPMEGARVFGALGPIGPSSPGLTLGGLAVSEHRLSNKLLAWSGVLEWQEKRRPYSDSTAKLKRTLPCQAYVNQGENLETDQWPQKLIMQLIPQQLLTTLGPLFRNSQLAQFHFTNRDCDSLKGLCRIMGNGFAGCMLFPHISPCEVRVLMLLYSSKKKIFMGLIPYDQSGFVSAIRQVITTRKQAVGPGGVNSGPVQIVNNKFLAWSGVMEWQEPRPEPNSRSKRWLPSHVYVNQGEILRTEQWPRKLYMQLIPQQLLTTLVPLFRNSRLVQFHFTKDLETLKSLCRIMDNGFAGCVHFSYKASCEIRVLMLLYSSEKKIFIGLIPHDQGNFVNGIRRVIANQQQVLQRNLEQEQQQRGMGG

SEQ ID NO: 1253 - protein, 214 aa, Homo sapiens
GRPALGREAPPQAGLSSTPPPCSETCTMGPHSILRTVHCRPTKTPPEPSAEPHPLSLLTSSNTSLAGTSLGRDLTPGGGKPPSGQTPRNPESPRHRLGSPRGRRWLASPTPTGSGRSGPASRGQRRLSCAAQDPTSEGASVGAMEAGLGPPTAAPRGVVSEAAESLGGTLSWGAWGRPPAGPSGLAGRRSRREALRPDRKEASVMMAAVSAIQP

SEQ ID NO: 1254 - protein, 198 aa, Homo sapiens
  misc_feature (1)...(198): Xaa = any amino acid or other as shown in Table 3
PGVPTHGWPRSRVLTRVRGSRGSGKMAAAVVLAAGLRAARRAVAATGVRGGQVRGAAGVTDGNEVAKAQQATPGGAAPTIFSRILDKSLPADILYEDQQCLVFRDVAPQAPVHFLVIPKKPIPRISQAEEEDQQLTYVPPLSLXLLGHLLLVAKQTAKAEGLGDGYRLVINDGKLGAQSVYHLHIHVLGGRQLQWPPG

SEQ ID NO: 1255 - protein, 458 aa, Homo sapiens
  misc_feature (1)...(458): Xaa = any amino acid or other as shown in Table 3
VPNYLPSVSSAIGGEVPQRYVWRFCIGLHSAPRFLVAFAYWNHYLSCTSPCSCYRPLCRLNFGLNVVENLALLVLTYVSSSEDFTWVPGXGRSGEVFPEGTGLPLPHSDLPTSWCGHSLQCGSQSSFPPAIHENAFIVFIASSLGHMLLTCILWRLTKKHTVSQEDGLSLAGAPRQPRRKSRTSVLRIRVMVRWELSSNGNPGRGVLGLGLGLGNKLRVVGQNLGLXHCVWVVWETGEXKRWRLQMGIEXGVASRRQXVRNSVRGLVCHNSSAPPMYMGFFSPTVFGGGVGGXLHVTFILHPPEVEAAGIPLLLGPSLPQRQGREHIVVILAAPACAPFHDRXWEPREIRPSPXELGLRGEPTLSYPASCRVIRQPIPXDRKSYSWKQRLFIINFISFFSALAVYFRHNMYCEAGVYTIFAILEYTVVLTNMAFHMTAWWDFGNKELLITSQPEEKRF

SEQ ID NO: 1256 - protein, 83 aa, Homo sapiens
IDLLEIRNGPRSHESFQEMDLNDDWKLSKDEVKAYLKKEFEKHGAVVNESHHDALVEDIFDKEDEDKDGFISAREFTYKHDEL

SEQ ID NO: 1257 - protein, 203 aa, Homo sapiens
PRVRGRVGKEGAAAKPRSLLRRFQLLSWSVCGGNKDPWVQELMSCLDLKECGHAYSGIVAHQKHLLPTSPPISQASEGASSDIHTPAQMLLSTLQSTQRPTLPVGSLSSDKELTRPNETTIHTAGHSLAAGPEAGENQKQPEKNAGPTARTSATVPVLCLLAIIFILTAALSYVLCKRRRGQSPQSSPDLPVHYIPVAPDSNT

SEQ ID NO: 1258 - protein, 195 aa, Homo sapiens
LIISNFLKAKQKPGSTPNLQQKKSQARLAPDIVSASQYRKFDEFQTGILIYELLHQPNPFEVRAQLRERDYRQEDLPPLPALSLYSPGLQQLAHLLLEADPIKRIRIGEAKRVLQCLLWGPRRELVQQPGTSEEALCGTLHNWIDMKRALMMMKFAEKAVDRRRGVELEDWLCCQYLASAEPGALLQSLKLLQLL

SEQ ID NO: 1259 - protein, 672 aa, Homo sapiens
  misc_feature (1)...(672): Xaa = any amino acid or other as shown in Table 3
KRGLIVVMAHEMIGTQIVTERGVALLESGTEKVLLIDSRPFVEYNTSHILEAININCSKLMKRRLQQDKVLITELIQHSAKHKVDIDCSQKVVVYDQSSQDVASLSSDCFLTVLLGKLEKSFNSVHLLAGGFAEFSRCFPGLCEGKSTLVPTCISQPCLPVANIGPTRILPNLYLGCQRDVLNKELMQQNGIGYVLNASNTCPKPDFIPESHFLRVPVNDSFCEKILPWLDKSVDFIEKAKASNGCVLVHCLAGISRSATIAIAYIMKRMDMSLDEAYRFVKEKRPTISPNFNFLGQLLDYEKKIKNQTGASGPKSKLKLLHLEKPNEPVPAVSEGGQKSETPLSPPCADSATSEAAGQRPVHPASVPSVPSVQPSLLEDSPLVQALSGLHLSADRLEDSNKLKRSFSLDIKSVSYSASMAASLHGFSSSEDALEYYKPSTTLDGTNKLCQFSPVQELCGADSRNQSXXGGSQPSPRSCRPPGLQTARASDCIRSEPAAVAPPRGPFYLHCIEVGAWRTITTPASFSAFPPPAAPHEVCWPGPXGLAPDILAPQTSTPSLTSSWYFATESSHFYSASAIYGGSASYSAYSCSQLPTCGDQVYSVRRRQKPSDRADSRRSWHEESPFEKQFKRRSCQMEFGESIMSENRSREELGKVGSQSSFSGSMEIIEVS

SEQ ID NO: 1260 - protein, 260 aa, Homo sapiens
ASSSKRVSRQKMLQLWKLVLLCGVLTGTSESLLDNLGNDLSNVVDKLEPVLHEGLETVDNTLKGILEKLKVDLGVLQKSSAWQLAKQKAQEAEKLLNNVISKLLPTNTDIFGLKISNSLILDVKAEPIDDGKGLNLSFPVTANVTEAGPIIDQIINLRASLDLLTAVTIETDPQTHHPVAGLGECARDPTSISLCLLDKHSQIINKFVNSVINTLKSTVSSLLQKEICPLIRIFIHSLDVNVIQQVVDNPQHKTQLQTLI

SEQ ID NO: 1261 - protein, 278 aa, Homo sapiens
CSLRRPRSAAEPDADHVPLLGLLRLQLRAARQPGAMRPQGPAASPQRLRGLLLLLLLQLPAPSSASEIPKGKQKAQLRQREVVDLYNGMCLQGPAGVPGRDGSPGANGIPGTPGIPGRDGFKGEKGECLRESFEESWTPNYKQCSWSSLNYGIDLGKIAECTFTKMRSNSALRVLFSGSLRLKCRNACCQRWYFTFNGAECSGPLPIEAIIYLDQGSPEMNSTINIHRTSSVEGLCEGIGAGLVDVAIWVGTCSDYPKGDASTGWNSVSRIIIEELPK

SEQ ID NO: 1262 - protein, 362 aa, Homo sapiens
MHSAMLGTRVNLSVSDFWRVMMRVCWLVRQDSRHQRIRLPHLEAVVIGRGPETKITDKKCSRQQVQLKAECNKGYVKVKQVGVNPTSIDSVVIGKDQEVKLQPGQVLHMVNELYPYIVEFEEEAKNPGLETHRKRKRSGNSDSIERDAAQEAEAGTGLEPGSNSGQCSVPLKKGKDAPIKKESLGHWSQGLKISMQDPKMQVYKDEQVVVIKDKYPKARYHWLVLPWTSISSLKAVAREHLELLKHMHTVGEKVIVDFAGSSKLRFRLGYHAIPSMSHVHLHVISQDFDSPCLKNKKHWNSFNTEYFLESQAVIEMVQEAGRVTVRDGMPELLKLPLRCHECQQLLPSIPQLKEHLRKHWTQ

SEQ ID NO: 1263 - protein, 618 aa, Homo sapiens
  misc_feature (1)...(618): Xaa = any amino acid or other as shown in Table 3
DMSDTSESGAGLTRFQAEASEKDSSSMMQTLLTVTQNVEVPETPKASKALEVSEDVKVSKASGVSKATEVSKTPEAREAPATQASSTTQLTDTQVLAAENKSLAADTKKQNADPQAVTMPATETKKVSHVADTKVNTKAQETEAAPSQAPADEPEPESAAAQSQENQDTRPKVKAKKARKVKHLDGEEDGSSDQSQASGTTGGRRVSKALMASMARRASRGPIAFWARRASRTRLACFGPGEPLLSPWRSPKARRQRGFAVRVAKFQSSQEPEAPPPWDVALLQGRANDLVKYLLAKDQTKIPIKRSDMLKDIIKEYTDVYPEIIERAGYSLEKVFGIQLKEIDKNDHLYILLSTLEPTDAGILGTTKDSPKLGLLMVLLSIIFMNGNRSSEAVIWEVLRRSLGLRLGIHHSLLGDVKKLITDEVVKQKYLDYARVPHSNSPEYEFFWGLRSYYEDQQRXKSFKFACKVQKKDPKEWAAQSPPGKARERMEADLKAASXGSPWKPRLRAEIKARMGIGLGSENAAGPCNWDEADIGPWAKARIQAGAEAKAKAQESGSASTGASTSTNNSASASASTSGGFSAGASLTATLTFGLFAGLGGAGASTSGSSGACGFSYK

SEQ ID NO: 1264 - protein, 464 aa, Homo sapiens
  misc_feature (1)...(464): Xaa = any amino acid or other as shown in Table 3
ARPPVCTGSTMSLTVVSMACVGFFLLQGAWPLMGGQDKPFLSARPSTVVPRGGHVALQCHYRRGFNNFMLYKEDRSHVPIFHGRIFQESFIMGPVTPAHAGTYRCRGSRPHSLTGWSAPSNPLVIMVTGNHRKPSLLAHPGPLLKSGETVILQCWSDIMFEHFFLHKEGISKDPSRLVGQIHDGVSKANFSIGPMMLALAGTYRCYGSVTHTPYQLSAPSDPLDIVVTGPYEKPSLSAQPGPKVQAGESVTLSCSSRSSYDMYHLSREGGAHERRLPAVRKVNRTFQADFPLGPATHGGTYRCFGSFRHSPYEWSDPSDPLLVSVTGNPSSSWPSPTEPSSKSGNLRHLHILIGTSVVKIPFTILLFFLLHRWCSNKKNAAVMDQEPAGNRVNSEDSDEQDHQEVSYPXLEHCVFTQRKITRPSQRPKTPPTDTSMYIELPNAEPRSKVVFCPRAPQSGLEGIF

SEQ ID NO: 1265 - protein, 1879 aa, Homo sapiens
  misc_feature (1)...(1879): Xaa = any amino acid or other as shown in Table 3
LHNLRERYFSGLIYTYSGLFCVVVNPYKHLPIYSEKIVDMYKGKKRHEMPPHIYAIADTAYRSMLQDREDQSILCTGESGAGKTENTKKVIQYLAVVASSHKGKKDTSITGELEKQLLQANPILEAFGNAKTVKNDNSSRFGKFIRINFDVTGYIVGANIETYLLEKSRAIRQARDERTFHIFYYMIAGAKEKMRSDLLLEGFNNYTFLSNGFVPIPAAQDDEMFQETVEAMAIMGFSEEEQLSILKVVSSVLQLGNIVFKKERNTDQASMPDNTAAQKVCHLMGINVTDFTRSILTPRIKVGRDVVQKAQTKEQADFAVEALAKATYERLFRWILTRVNKALDKTHRQGASFLGILDIAGFEIFEVNSFEQLCINYTNEKLQQLFNHTMFILEQEEYQREGIEWNFIDFGLDLQPCIELIERPNNPPGVLALLDEECWFPKATDKSFVEKLCTEQGSHPKFQKPKQLKDKTEFSIIHYAGKVDYNASAWLTKNMDPLNDNVTSLLNASSDKFVADLWKDVDRIVGLDQMAKMTESSLPSASKTKKGMFRTVGQLYKEQLGKLMTTLRNTTPNFVRCIIPNHEKRSGKLDAFLVLEQLRCNGVLEGIRICRQGFPNRIVFQEFRQRYEILAANAIPKGFMDGKQACILMIKALELDPNLYRIGQSKIFFRTGVLAHLEEERDLKITDVIMAFQAMCRGYLARKAFAKRQQQLTAMKVIQRNCAAYIKLRNWQWCRLFTKVXPLLQVTRQEXEMQAKEDELQKTKERQQKAENELKELEQKHSQLTEEKNLLQEQLQAETELYAEAEEMRVRLAAKKQELEEILHEMEARLEEEEDRGQQLQAERKKMAQQMLDLEEQLEEEEAARQKLQLEKVTAEAKIKKLEDEILVMDDQNNKLSKERKLLEERISDLTTNLAEEEEKAKNLTKLKNKHESMISELEVRLKKEEKSRQELEKLKRKLEGDASDFHEQIADLQAQIAELKMQLAKKEEELQAALARLDDEIAQKNNALKKIRELEGHISDLQEDLDSERAARNKAEKQKRDLGEELEALKTELEDTLDSTATQQELRAKREQEVTVLKRALNEETRSHEAQVQEMRQKHAQAVQSLTEQLEQXKRAKANLDKNKQTLEKENTDLAGELRVLGQAKQEVEHRMKKLQAQVQELQSKCSDGERARAELNDKVHKLQNEVESVTGMLNEAEGKAIKLAKDVASLSSQLQDTQELLQEESRQKLNVSTSLRQLEEERNSLQDQLDEEMEAKQNLERHISTLNIQLSDSKKKLQDFASTVEALEEGKKRFQKEIENLTQQYEEKAAAYDKLEKTKNRLQQELDDLVVDLDNQRQLVSNLEKKQRKFDQLLAEEKNISSKYADERDRVEAEAREKETKALSLARALEEALEAKEELERTNKMLKAEMGRPGSASKDDVGQELSHDLEKSKRALGDPRLEEMKTQLEELGRTELASPRRDAKLRLEVNMQAPSRASFERDLQARTEQNEESRRHLQRQLHEYETELEDERKQRALAAAAKIKLGWDPVRTLDLXADSAIKGRGGKAIKQLRKLQAQMKDFQRELEDARASRDEIFATAKENEKKAKSLEADLMQLQEDLAAAEEGRKQADLEKEELAEELASSLSGRNALQDEKRRLEARIAQLEEELEEEQGNMEAMSDRVRKATQQAEQLSNELATERSTAQKNESARQQLERQNKELRSKLHEMEGAVKSKFKSTIAALEAKIAQLEEQVEQEAREKQAATKSLKQKDKKLKEILLQVEDERKMAEQYKEQAEKGNARVKQLKRQLEEAEEESQRINANRRKLQRELDEATESNEAMGREVNALKSKLRRGNETSFVPSRRSGGRRVIENADGSEEETDTRDADFNGTKASE

SEQ ID NO: 1266 - protein, 257 aa, Homo sapiens
KLHFAKSLNSELSCSTREAMQDEDGYITLNIKTRKPALVSVGPASSSWWRVMALILLILCVGMVVGLVALGIWSVMQRNYLQDENENRTGTLQQLAKRFCQYVVKQSELKGTFKGHKCSPCDTNWRYYGDSCYGFFRHNLTWEESKQYCTDMNATLLKIDNRNIVEYIKARTHLIRWVGLSRQKSNEVWKWEDGSVISENMFEFLEDGKGNMNCAYFHNGKMHPTFCENKHYLMCERKAGHDPRWTQLPLMPKRWTG

SEQ ID NO: 1267 - protein, 208 aa, Homo sapiens
NQGLRDVGLCRTCLVNKIFASSILGKSHHHSLVSINQGHNAPWKAAGSLPLKAAYCQGFSPCDCLKYGSWDEKDLMVPQPDTHKGSVLRWISKRGKPLAVEMEEGHCLCLPLGTECLGVKPIVHLFNSEMGEKRPVAGARHVGSSAALLFFTPLRCLGGEKHKSGLRARPGIVPSLELNYDIDSFAHMFFSVDLLLIITLLSYYIPFC

SEQ ID NO: 1268 - protein, 157 aa, Homo sapiens
MWWRLAPTQAIWRAAGCCMRFSRRRSTCCCLASCIFLLYKIVRGDQPAAKRRQRRRRAAPSAPPQAARLHPPPKLRRFDGVQDPAPYSWAINGKVFDVTQRPANFLRGPRGPETLSDWESQFTFKYHHVGKLLKEGEEPTVYSDEEEPKDESARKND

SEQ ID NO: 1269 - protein, 178 aa, Homo sapiens
GPRMAKFLSQDQINEYKECFSLYDKQQRGKIKATDLMVAMRCLGASPTPGEVQRHLQTHGIDGNGELDFSTFLTIMHMQIKQEDPKKEILLAMLMVDKEKKGYVMASDLRSKLTSLGEKLTHKEVDDLFREADIEPNGKVKYDEFIHKITLLPGRDLLKEENGRASPGPENLEQLIFL

SEQ ID NO: 1270 - protein, 457 aa, Homo sapiens
ADPHTTVIRFFPAASATKRVLPPVLRVSSPRTWNPNVPESPRIPAPRLPKRMSGAPTAGAALMLCAATAVLLSAQGGPVQSKSPRFASWDEMNVLAHGLLQLGQGLREHAERTRSQLSALERRLSACGSACQGTEGSTDLPLAPESRVDPEVLHSLQTQLKAQNSRIQQLFHKVAQQQRHLEKQHLRIQHLQSQFGLLDHKHLDHEVAKPARRKRLPEMAQPVDPAHNVSRLHRLPRDCQELFQVGERQSGLFEIQPQGSPPFLVNCKMTSDGGWTVIQRRHDGSVDFNRPWEAYKAGFGDPHGEFWLGLEKVHSITGDRNSRLAVQLRDWDGNAELLQFSVHLGGEDTAYSLQLTAPVAGQLGATTVPPSGLSVPFSTWDQDHDLRRDKNCAKSLSGGWWFGTCSHSNLNGQYFRSIPQQRQKLKKGIFWKTWRGRYYPLQATTMLIQPMAAEAAS

SEQ ID NO: 1271 - protein, 394 aa, Homo sapiens
ALDFGDSCQWPRPQDTMKQLPVLEPGDKPRKATWYTLTVPGDSPCARVGHSCSYLPPVGNAKRGKVFIVGGANPNRSFSDVHTMDLGKHQWDLDTCKGLLPRYEHASFIPSCTPDRIWVFGGANQSGNRNCLQVLNPETRTWTTPEVTSPPPSPRTFHTSSAAIGNQLYVFGGGERGAQPVQDTKLHVFDANTLTWSQPETLGNPPSPRHGHVMVAAGTKLFIHGGLAGDRFYDDLHCIDISDMKWQKLNPTGAAPAGCASHTPAVAMGKHVYIFGGMTPAGAPGTQCTQYHTEEQHWDPCLKFDTPSYPPGTIGTHSHVVSFPWPVTCASEKEDSNSLTLNHEAEKEDSADKVMSHSGDSHEESQTATLLCLVFGGMNTEGEIYDDCIVTVVD

SEQ ID NO: 1272 - protein, 176 aa, Homo sapiens
GFSIGKATDRMDAFRKAKNRAVHHLHYIERYEDHTIFHDISLRFKRTHIKMKKQPKGYGLRCHRAIITICRLIGIKDMYAKVSGSINMLSLTQGLFRGLSRQETHQQLADKKGLHVVEIREECGPLPIVVASPRGPLRKDPEPEDEVPDVKLDWEDVKTAQGMKRSVWSNLKRAAT

SEQ ID NO: 1273 - protein, 457 aa, Homo sapiens; identical to SEQ ID NO: 1270

SEQ ID NO: 1274 - protein, 359 aa, Homo sapiens
TLRSRPAGEAGYLGWDPEQAGEGSALSRPGAMAALMTPGTGAPPAPGDFSGEGSQGLPDPSPEPKQLPELIRMKRDGGRLSEADIRGFVAAVVNGSAQGAQIGAWGGLGVPDPDWEVSPRDFGSLGVRRCPTTSTGPRVPHRCGLPPSRVPPHTRGMLMAIRLRGMDLEETSVLTQALAQSGQQLEWPEAWRQQLVDKHSTGGVGDKVSLVLAPALAACGCKVINHLLSRREPIPHMQQPVHPQAAPNLKPGPKPPRPYQGFSPPCSPAQFSPPRSPAQRLGPLWLQTRPLGAGKRSTDGIQTPFPLGPQTAPPREELRTSLPLPQALFPQGQVPTSSPTDTSQPRKLPFHSLTSWAPL

SEQ ID NO: 1275 - protein, 146 aa, Homo sapiens
  misc_feature (1)...(146): Xaa = any amino acid or other as shown in Table 3
RALRELRERVTHGLAEAGRDREDVSTELYRALEAVRLQNSEGSCEPCPTSWLPFGGSCYYFSVPKTTWAEAQGHCADASAHLAIVGGLGEQDFLSRDTSALEYWIGRRAVQHLRKVQGYSWVDGVPLSFRXWEGHPGETWGPQVRL

SEQ ID NO: 1276 - protein, 187 aa, Homo sapiens
RWPRSWPPRAGAARGAAEAAMVGALCGCWFRLGGARPLIPLGPTVVQTSMSRSQVALLGLSLLLMLLLYVGLPGPPEQTSCLWGDPNVTVLAGLTPGNSPIFYREVLPLNQAHRVEVCCFMERPLTLTRGSSWAHCSYCHRGATGPWPLTFQVLGTRHLQRRQAQRQGGQRCWSGRCGTWRYRMPCW

SEQ ID NO: 1277 - protein, 481 aa, Homo sapiens
QENQLEKKMKFLIFAFFGGVHLLSLCSGKAICKNGISKRTFEEIKEEIASCGDVAKAIINLAVYGKAQNRSYERLALLVDTVGPRLSGSKNLEKAIQIMYQNLQQDGLEKVHLEPVRIPHWERGEESAVMLEPRIHKIAILGLGSSIGTPPEGITAEVLVVTSFDELQRRASEARGKIVVYNQPYINYSRTVQYRTQGAVEAAKVGALASLIRSVASFSIYSPHTGIQEYQDGVPKIPTACITVEDAEMMSRMASHGIKIVIQLKMGAKTYPDTDSFNTVAEITGSKYPEQVVLVSGHLDSWDVGQGAMDDGGGAFISWEALSLIKDLGLRPKRTLRLVLWTAEEQGGVGAFQYYQLHKVNISNYSLVMESDAGTFLPTGLQFTGSEKARAIMEEVMSLLQPLNITQVLSHGEGTDINFWIQAGVPGASLLDDLYKYFFFHHSHGDTMTVHGIQTQMNVAAAVWAVVSYVVADMEEMLPRS

SEQ ID NO: 1278 - protein, 428 aa, Homo sapiens
TKPRKRRHQPASQRQRPWSSDSTGDLLARGKGRKEENKGSDRVSLAPPSLRRPMMCQSEARQGPELRAAKWLHFPQLALRRRLGQLSCMSRPALKLRSWPLTVLYYLLPFGALRPLSRVGWRPVSRVALYKSVPTRLLSRAWGRLNQVELPHWLRRPVYSLYIWTFGVNMKEAAVEDLHHYRNLSEFFRRKLKPQARPVCGLHSVISPSDGRILNFGQVKNCEVEQVKGVTYSLESFLGPRMCTEDLPFPPAASCDSFKNQLVTREGNELYHCVIYLAPGDYHCFHSPTDWTVSHRRHFPGSLMSVNPGMARWIKELFCHNERVVLTGDWKHGFFSLTAVGATNWGSIRIYFDRDLHTNSPRHSKGSYNDFSFVTHTNREGVPMRKGEHLGEFNLGSTIVLIFEAPKDFNFQLKTGQKIRFGEALGSL

SEQ ID NO: 1279 - protein, 633 aa, Homo sapiens
LPERAFGPRTPRAPRRRRRRLLLSPPPRPPPPLDREPRAPGPWLCPSRAGTAQDPARIRERRGRVAGGAAGPAMELRARGWWLLCAAAALVACARGDPASKSRSCGEVRQIYGAKGFSSSDVPQAEISGEHLRICPQGYTCCTSEMEENLANRSHAELETALRDSSRVLQAMLATQLRSFDDHFQHLLNDSERTLQATFPGAFGELYTQNARAFRDLYSELRLYYRGANLHLEETLAEFWARLLERLFKQLHPQLLLPDDYLDCLGKQAEALRPFGEAPRELRLRATRAFVAARSFVQGLGVASDVVRKVAQVPLGPECSRAVIEAGSYCALHCVGVPGARPCPDYCRNVLKGCLANQADLDAEWRNLLDSMVLITDKFWGTSGVESVIGSVHTWLAEAINALQDNRDTLTAKVIQGCGNPKVNPQGPGPEEKRRRGKLAPRERPPSGTLEKLVSEAKAQLRDVQDFWISLPGTLCSEKMALSTASDDRCWNGMARGRYLPEVMGDGLANQINNPEVEVDITKPDMTIRQQIMQLKIMTNRLRSAYNGNDVDFQDASDDGSGSGSGDGCLDDLCGRKVSRKSSSSRTPLTHALPGLSEQEGQKTSAASCPQPPTFLLPLLLFLALTVARPRWR

SEQ ID NO: 1280 - protein, 133 aa, Homo sapiens
  misc_feature (1)...(133): Xaa = any amino acid or other as shown in Table 3
ATELTRAGMEASALTKSAVTSVAKVVRVASGSAVVLPLARIATSCDXRVGGPVQAVPMVLSAMGLQLRAGIASSSIAAKMMSAAAIANGGGVSPGQPLWLLLQSLGATGLSGLTKFILGSIGSAIAAVIARFY

SEQ ID NO: 1281 - protein, 457 aa, Homo sapiens
TNGRNLLHHWILGVCGMHPHHQETLKKNRVVLAKQLLLSELLEHLLEKDIITLEMRELIQAKVGSFSQNVELLNLLPKRGPQAFDAFCEALRETKQGHLEDMLLTTLSGLQHVLPPLSCDYDLSLPFPVCESCPLYKKLRLSTDTVEHSLDNKDGPVCLQVKPCTPEFYQTHFQLAYRLQSRPRGLALVLSNVHFTGEKELEFRSGGDVDHSTLVTLFKLLGYDVHVLCDQTAQEMQEKLQNFAQLPAHRVTDSCIVALLSHGVEGAIYGVDGKLLQLQEVFQLFDNANCPSLQNKPKMFFIQACRGGAIGSLGHLLLFTAATASLALETDRGVDQQDGKNHAGSPGCEESDAGKEKLPKMRLPTRSDMICGYACLKGTAAMRNTKRGSWYIEALAQVFSERACDMHVADMLVKVNALIKDREGYAPGTEFHRCKEMSEYCSTLCRHLYLFPGHPPT

SEQ ID NO: 1282 - protein, 195 aa, Homo sapiens
VRGKEVMAALCRTRAVAAESHFLRVFLFFRPFRGVGTESGSESGSSNAKEPKTRAGGFASALERHSELLQKVEPLQKGSPKNVESFASMLRHSPLTQMGPAKDKLVIGRIFHIVENDLYIDFGGKFHCVCRRPEVDGEKYQKGTRVRLRLLDLELTSRFLGATTDTTVLEANAVLLGIQESKDSRSKEEHLEKYI

SEQ ID NO: 1283 - protein, 1499 aa, Homo sapiens
IPGASPAPRRAAPLRLGLRLASGWARAPGGVSPVPGPGMGGDAPTMARAQALVLELTFQLCAPETETPEVGCTFEEGSDPAVPCEYSQAQYDDFQWEQVRIHPGTRAPADLPHGSYLMVNTSQHAPGQRAHVIFQSLSENDTHCVQFSYFLYSRDGHSPGTLGVYVRVNGGPLGSAVWNMTGSHGRQWHQAELAVSTFWPNEYQVLFEALISPDRRGYMGLDDILLLSYPCAKAPHFSRLGDVEVNAGQNASFQCMAAGRAAEAERFLLQRQSGALVPAAGVRHISHRRFLATFPLAAVSRAEQDLYRCVSQAPRGRGTSLNFAEFMVKEPPTPIAPPQLLRAGPTYLIIQLNTNSIIGDGPIVRKEIEYRMARGPWAEVHAVSLQTYKLWHLDPDTEYEISVLLTRPGDGGTGRPGPPLISRTKCAEPMRAPKGLAFAEIQARQLTLQWEPLGYNVTRCHTYTVSLCYHYTLGSSHNQTIRECVKTEQGVSRYTMKNLLPYRNVHVRLVLTNPEGRKEGKEVTFQTDEDVPSGIAAESLTFTPLEDMIFLKWEEPQEPNGLITQYEISYQSIESSDPAVNVPGPRRTISKLRNETYHVFSNLHPGTTYLFSVRARTGKGFGQAALTEITTNISAPSFDYADMPSPLGESENTITVLLRPAQGRGAPISVYQVIVEEEQGSRRLRREPGGQDCFPVPLTFEAALARGLVDYFGAELAASSLPEAMPFTVGDNKTYRGFWNPPLEPRKAYLIYFQAASHLKGETRLNCIRIARKAACKESKRPLEVSQRSEEMGLILGICAGGLAVLILLLGAIIVIIRKGRDHYAYSYYPKPVNMTKATVNYRQEKTHMMSAVDRSFTDQSTLQEDERLGLSFMDTHGYSTRGDQRSGGVTEASSLLGGSPRRPCGRKGSPYHTGQLHPAVRVADLLQHINQMKTAEGYGFKQEYESFFEGWDATKKKDKVKGSRQEPMPAYDRHRVKLHPMLGDPNADYINANYIDIRINREGYHRSNHFIATQGPKPEMVYDFWRMVWQEHCSSIVMITKLVEVGRVKCSRYWPEDSDTYGDIKIMLVKTETLAEYVVRTFALERRGYSARHEVRQFHFTAWPEHGVPYHATGLLAFIRRVKASTPPDAGPIVIHCSAGTGRTGCYIVLDVMLDMAECEGVVDIYNCVKTLCSRRVNMIQTEEQYIFIHDAILEACLCGETTIPVSEFKATYKEMIRIDPQSNSSQLREEFQTLNSVTPPLDVEECSIALLPRNRDKNRSMDVLPPDRCLPFLISTDGDSNNYINAALTDSYTRSAAFIVTLHPLQSTTPDFWGLVYDYGCTSIVMLNQLNQSNSAWPCLQYWPEPGRQQYGLMEVEFMSGTADEDLVARVFRVQNISRLQEGHLLVRHFQFLRWSAYRDTPDSKKAFLHLLAEGDKWQAESGDGRTIVHCLNGGGRSGTFCACATVLEMIRCHNLVDVFFAAKTLRNYKPNMVETMDQYHFCYDVALEYLEGLESR

SEQ ID NO: 1284 - protein, 430 aa, Homo sapiens
TKPRKRRHQPASQRQRPWSSDSTGDLLARGKGRKEENKGSDRVSLAPPSLRRPMMCQSEARQGPELRAAKWLHFPQLALRRRLGQLSCMSRPALKLRSWPLTVLYYLLPFGALRPLSRVGWRPVSRVALYKSVPTRLLSRAWGRLNQVELPHWLRRPVYSLYIWTFGVNMKEAAVEDLHHYRNLSEFFRRKLKPQARPVCGLHSVISPSDGRILNFGQVKNCEVEQVKGVTYSLESFLGPRMCTEDLPFPPAASCDSFKNQLVTREGNELYHCVIYLAPGDYHCFHSPTDWTVSHRRHFPGSLMSVNPGMARWIKELFCHNERVVLTGDWKHGFFSLTAVGATNWGSIRIYFDRDLHTNSPRHSKGSYNDFSFVTHTNREGVPMALRGEHLGQSFNLGSTIVLIFEAPKDFNFQLKTGQKIRFGEALGSL

SEQ ID NO: 1285 - protein, 957 aa, Homo sapiens
AELGLFGSLRFSSLLHFPPRPRSPASACGPGEGRMERGLPLLCAVLALVLAPAGAFRNDKCGDTIKIESPGYLTSPGYPHSYHPSEKCEWLIQAPDPYQRIMINFNPHFDLEDRDCKYDYVEVFDGENENGHFRGKFCGKIAPPPVVSSGPFLFIKFVSDYETHGAGFSIRYEIFKRGPECSQNYTTPSGVIKSPGFPEKYPNSLECTYIVFAPKMSEIILDFESFDLEPDSNPPGGMFCRYDRLEIWDGFPDVGPHIGRYCGQKTPGRIRSSSGILSMVFYTDSAIAKEGFSANYSVLQSSVSEDFKCMEALGMESGEIHSDQITASSQYSTNWSAERSRLNYPENGWTPGEDSYREWIQVDLGLLRFVTAVGTQGAISKETKKKYYVKTYKIDVSSNGEDWITIKEGNKPVLFQGNTNPTDVVVAVFPKPLITRFVRIKPATWETGISMRFEVYGCKITDYPCSGMLGMVSGLISDSQITSSNQGDRNWMPENIRLVTSRSGWALPPAPHSYINEWLQIDLGEEKIVRGIIIQGGKHRENKVFMRKFKIGYSNNGSDWKMIMDDSKRKAKSFEGNNNYDTPELRTFPALSTRFIRIYPERATHGGLGLRMELLGCEVEAPTAGPTTPNGNLVDECDDDQANCHSGTGDDFQLTGGTTVLATEKPTVIDSTIQSEFPTYGFNCEFGWGSHKTFCHWEHDNHVQLKWSVLTSKTGPIQDHTGDGNFIYSQADENQKGKVARLVSPVVYSQNSAHCMTFWYHMSGSHVGTLRVKLRYQKPEEYDQLVWMAIGHQGDHWKEGRVLLHKSLKLYQVIFEGEIGKGNLGGIAVDDISINNHISQEDCAKPADLDKKNPEIKIDETGSTPGYEGEGEGDKNISRKPGNVLKTLEPILITIIAMSALGVLLGAVCGVVLYCACWHNGMSERNLSALENYNFELVDGVKLKKDKLNTQSTYSEA

SEQ ID NO: 1286 - protein, 173 aa, Homo sapiens
  misc_feature (1)...(173): Xaa = any amino acid or other as shown in Table 3
HEGSALTWASHYQERLNSEQSCLNEWTAMADLESLRPPSAEPGGSVCGGEGLGGGEGRIMQWGAWWRGERAPXLRGSAPRSSEQEQMEQAIRAELWKVLDVSDLESVTSKEIRQALELRLGLPLQPVPXLHRQPDAAAGGTAGPSLPHLPPPLPGLRVERSKPGGAAEEQVGL

SEQ ID NO: 1287 - protein, 180 aa, Homo sapiens
MAALDLRAELDSLVLQLLGDLEELEGKRTVLNARVEEGWLSLAKARYAMGAKSVGPLQYASHMEPQVCLHASEAQEGLQKFKVVRAGVHAPEEVGPREAGLRRRKGPTKTPEPESSEAPQDPLNWFGILVPHSLRQAQASFRDGLQLAADIASLQNRIDWGRSQLRGLQEKLKQLEPGAA

SEQ ID NO: 1288 - protein, 216 aa, Homo sapiens
HSDVGAATAVLPLLTAVLGVTVVTRRDTEGPGRAALVHLTGSPRQKVGTSGREGLPGLGASCAESELERETQEPRSRGRCIFGAARWRQVPLASPQRPFLLSPGPRLHRMGLPVSWAPPALWVLGCCALLLSLWALCTACRRPEDAVAPRKRARRQRARLQGSATAAEAVSAKLSRGPGWGPQGTDQPSSPPVPTEADPPLLPQQVGHQTARAAPG

SEQ ID NO: 1289 - protein, 148 aa, Homo sapiens
  misc_feature (1)...(148): Xaa = any amino acid or other as shown in Table 3
LTGPGQRLAGTTEGPRRCRGSSQAPTPTWKLVDTRLCAAAPWLASRAPGHYSQMLLVNXPCRKDWLVSKWMRTPVCGQSPAMTDRPRSEAGRDHRRAKALPGLIPGSNPNLEACGHQALCSSSVASVQGPWPLLPNASSPPTPGQPQP

SEQ ID NO: 1290 - protein, 170 aa, Homo sapiens
  misc_feature (1)...(170): Xaa = any amino acid or other as shown in Table 3
KHRLCSLEQLMTLISAAREYEIEFIYAISPGLDITFSNPKEVSTLKRKLDQVSQFGCRSFALLFDDIDHNMCAADKEVFSSFAHAQVSITNEIYQYLGEPETFLFCPTEYCIXWLYIXLVFLEYITYKGPWAPFSLHFPPPLVCKSRNLFLEDIFQDPKLEKFXELINDN

SEQ ID NO: 1291 - protein, 98 aa, Homo sapiens
TSALTQGLERIPDQLGYLVLSEGAVLASSGDLENDEQAASAISELVSTACGFRLHRGMNVPFKRLSVVFGEHTLLVTVSGQRVFVVKRQNRGREPIDV

SEQ ID NO: 1292 - protein, 142 aa, Homo sapiens
AKRAERTSRLQGLQHPSPPYPPATLGVTPGQDRTLQLQHQCPAGRKSRKKKSKATQLSPEDRVEDALPPSKAPSRTRRAKRDLPKRTATQRPEGTSLQQDPEAPTVPKKGRRKGRQAASGHCRPRKVKADIPSLEPEGTSAS

SEQ ID NO: 1293 - protein, 89 aa, Homo sapiens
  misc_feature (1)...(89): Xaa = any amino acid or other as shown in Table 3
RKSSWLGAVAHACNPSSLGGPGRQITRSGVRDQPGQYGETPSLLKIQTLAGRGGACLXSHILRRLRQKNRLNLGGRGCSELRSRHCAPA

SEQ ID NO: 1294 - protein, 80 aa, Homo sapiens
AWNSARGAVSPLWVPGCFLTLSVTWIGAAPLILSRIVGGWECEKHSQPWQVLVASRGRAVCGGVLVHPQWVLTAAHCIRK

SEQ ID NO: 1295 - protein, 281 aa, Homo sapiens
AEMADDLGDEWWENQPTGAGSSPEASDGEGEGDTEVMQQETVPVPVPSEKTKQPKECFLIQPKERKENTTKTRKRRKKKITDVLAKSEPKPGLPEDLQKLMKDYYSSRRLVIELEELNLPDSCFLKANDLTHSLSSYLKEICPKWVKLRKNHSEKKSVLMLIICSSAVRALELIRSMTAFRGDGKVIKLFAKHIKVQAQVKLLEKRVVHLGVGTPGRIKELVKQGGLNLSPLKFLVFDWNWRDQKLRRMMDIPEIRKEVFELLEMGVLSLCKSESLKLGLF

SEQ ID NO: 1296 - protein, 213 aa, Homo sapiens
RPGTAIWVVECEHGRPIAESEGQEGRGHSPPGPCSVAGFLRGRLGRNLEIMGSTWGSPGWVRLALCLTGLVLSLYALHVKAARARDRDYRALCDVGTAISCSRVFSSRWGRGFGLVEHVLGQDSILNQSNSIFGCIFYTLQLLLGCLRTRWASVLMLLSSLVSLAGSVYLAWILFFVLYDFCIVCITTYAINVSLMWLSFRKVQEPQGKAKRH

SEQ ID NO: 1297 - protein, 353 aa, Homo sapiens
ESPAPPAFRPAMAAVALMPPPLLLLLLLASPPAASAPSARDPFAPQLGDTQNCQLRCRDRDLGPQPSQAGLEGASESPYDRAVLISACERGCRLFSICRFVARSSKPNATQTECEAACVEAYVKEAEQQACSHGCWSQPAEPEPEQKRKVLEAPSGALSLLDLFSTLCNDLVNSAQGFVSSTWTYYLQTDNGKVVVFQTQPIVESLGFQGGRLQRVEVTWRGSHPEALEVHVDPVGPLDKVRKAKIRVKTSSKAKVESEEPQDNDFLSCMSRRSGLPRWILACCLFLSVLVMLWLSCSTLVTAPGQHLKFQPLTLEQHKGFMMEPDWPLYPPPSHACEDSLPPYKLKLDLTKL

SEQ ID NO: 1298 - protein, 161 aa, Homo sapiens
FPELGTSLSAMRFLAATFLLLALSTAAQAEPVQFKDCGSVDGVIKEVNVSPCPTQPCQLSKGQSYSVNVTFTSNIQSKSSKAVVHGILMGVPVPFPIPEPDGCKSGINCPIQKDKTYSYLNKLPVKSEYPSIKLVVEWQLQDDKNQSLFCWEIPVQIVSHL

SEQ ID NO: 1299 - protein, 128 aa, Homo sapiens
APETFRCVWRLQGLTFIAFTELQAKVIDTQQKVKLADIQIEQLNRTKKHAHLTDTEIMTLVDETNMYEGVGRMFILQSKEAIHSQLLEKQKIAEEKIKELEQKKSYLERSVKEAEDNIREMLMARRAQ

SEQ ID NO: 1300 - protein, 265 aa, Homo sapiens
  misc_feature (1)...(265): Xaa = any amino acid or other as shown in Table 3
HSLLLGTRVRDASSKIQGEYTLTLRKGGNNKLSRVFHRDGHYGFSEPLTFCSVVDLINHYRHESLAQYNAKLDTRLLYPVSKYQQVRAGLGAREGSTWLAPGLSFLGRPDQAMHLPSFRHVSPDQIVKEDSVEAVGAQLKVYHQQYQDKSREYDQLYEEYTRTSQELQMKRTAIEAFNETIKIFEEQGQTQEKCSKEYLERFRREGNQTKEMQRILLNSERLKSRIAEIHESPHRSWEQQLLVPRASDNKRDIDKPHXTSLKPDL

SEQ ID NO: 1301 - protein, 490 aa, Homo sapiens
AAAAAGRGRSSGRRRRRRPGALFASLGVLLGPRPPPGIPRTRACSMGGVGEPGPREGPAQPGAPLPTFCWEQIRAHDQPGDKWLVIERRVYDISRWAQRHPGGSRLIGHHGAEDATDAFRAFHQDLNFVRKFLQPLLIGELAPEEPSQDGPLNAQLVEDFRALHQAAEDMKLFDASPTFFAFLLGHILAMEVLAWLLIYLLGPGWVPSALAAFILAISQAQSWCLQHDLGHASIFKKSWWNHVAQKFVMGQLKGFSAHWWNFRHFQHHAKPNIFHKDPDVTVAPVFLLGESSVEYGKKKRRYLPYNQQHLYFFLIGPPLLTLVNFEVENLAYMLVCMQWADLLWAASFYARFFLSYLPFYGVPGVLLFFVAVRVLESHWFVWITQMNHIPKEIGHEKHRDWVSSQLAATCNVEPSLFTNWFSGHLNFQIEHHLFPRMPRHNYSRVAPLVKSLCAKHGLSYEVKPFLTALVDIVRSLKKSGDIWLDAYLHQ

SEQ ID NO: 1302 - protein, 110 aa, Homo sapiens
KSRATRLRESAEMTGFLLPPASRGTRRSCSRSRKRQTRRRRNPSSFVASCPTLLPFACVPGASPTTLAFPPVVLTGPSTDGIPFALSLQRVPFVLPSPQVASLPLGHSRG

SEQ ID NO: 1303 - protein, 138 aa, Homo sapiens
IQYRSDLELHSITMKKSGVLFLLGIILLVLIGVQGTPVVRKGRCSCISTNQGTIHLQSLKDLKQFAPSPSCEKIEIIATLKNGVQTCLNPDSADVKELIKKWEKQVSQKKKQKNGKKHQKKKVLKVRKSQRSRQKKTT

SEQ ID NO: 1304 - protein, 1000 aa, Homo sapiens
IPGSTISCRGCCGKWPVQEADPPRAALRGRFPALLTRHCPSPRAEKEKRSLRRCGCRPLLVELAGPAGQAVEVLPHFESLGKQEKIPNKMSAFRNHCPHLDSVGEITKEDLIQKSLGTCQDCKVQGPNLWACLENRCSYVGCGESQVDHSTIHSQETKHYLTVNLTTLRVWCYACSKEVFLDRKLGTQPSLPHVRQPHQIQENSVQDFKIPSNTTLKTPLVAVFDDLDIEADEEDELRARGLTGLKNIGNTCYMNAALQALSNCPPLTQFFLDCGGLARTDKKPAICKSYLKLMTELWYKSRPGSVVPTTLFQGIKTVNPTFRGYSQQDAQEFLRCLMDLLHEELKEQVMEVEEDPQTITTEETMEEDKSQSDVDFQSCESCSNSDRAENENGSRCFSEDNNETTMLIQDDENNSEMSKDWQKEKMCNKINKVNSEGEFDKDRDSISETVDLNNQETVKVQIHSRASEYITDVHSNDLSTPQILPSNEGVNPRLSASPPKSGNLWPGLAPPHKKAQSASPKRKKQHKKYRSVISDIFDGTIISSVQCLTCDRVSVTLETFQDLSLPIPGKEDLAKLHSSSHPTSIVKAGSCGEAYAPQGWIAFFMEYVKRFVVSCVPSWFWGPVVTLQDCLAAFFARDELKGDNMYSCEKCKKLRNGVKFCKVQNFPEILCIHLKRFRHELMFSTKISTHVSFPLEGLDLQPFLAKDSPAQIVTYDLLSVICHHGTASSGHYIAYCRNNLNNLWYEFDDQSVTEVSESTVQNAEAYVLFYRKSSEEAQKERRRISNLLNIMEPSLLQFYISRQWLNKFKTFAEPGPISNNDFLCIHGGVPPRKAGYIEDLVLMLPQNIWDNLYSRYGGGPAVNHLYICHTCQIEAEKIEKRRKTELEIFIRLNRAFQKEDSPATFYCISMQWFREWESFVKGKDGDPPGPIDNTKIAVTKCGNVMLRQGADSGQISEETWNFLQSIYGGGPEVILRPPVVHVDPDILQAEEKIEVETRSL

SEQ ID NO: 1305 - protein, 141 aa, Homo sapiens
SPSAAGGLAWVSLALGSGSRGRDHSGSGVGTAMAGALVRKAADYVRSKDFRDYLMSTHFWGPVANWGLPIAAINDMKKSPEIISGRMTFALCCYSLTFMRFAYKVQPRNWLLFACHATNEVAQLIQGGRLIKHEMTKTASA

SEQ ID NO: 1306 - protein, 386 aa, Homo sapiens
LGSRQAAGTMRGQRSLLLGPARLCLRLLLLLGYRRRCPPLLRGLVQRWRYGKVCLRSLLYNSFGGSDTAVDAAFEPVYWLVDNVIRWFGVVFVVLVIVLTGSIVAIAYLCVLPLILRTYSVPRLCWHFFYSHWNLILIVFHYYQAITTPPGYPPQGRNDIATVSICKKCIYPKPARTHHCSICNRCVLKMDHHCPWLNNCVGHYNHRYFFSFCFFMTLGCVYCSYGSWDLFREAYAAIEKMKQLDKNKLQAVANQTYHQTPPPTFSFRERMTHKSLVYLWFLCSSVALALGALTVWHAVLISRGETSIERHINKKERRRLQAKGRVFRNPYNYGCLDNWKVFLGVDTGRHWLTRVLLPSSHLPHGNGMSWEPPPWVTAHSASVMAV

SEQ ID NO: 1307 - protein, 298 aa, Homo sapiens
ATRRRAAEAGMAAVLQRVERLSNRVVRVLGCNPGPMTLQGTNTYLVGTGPRRILIDTGEPAIPEYISCLKQALTEFNTAIQEIVVTHWHRDHSGGIGDICKSINNDTTYCIKKLPRNPQREEIIGNGEQQYVYLKDGDVIKTEGATLRVLYTPGHTDDHMALLLEEENAIFSGDCILGEGTTVFEDLYDYMNSLKELLKIKADIIYPGHGPVIHNAEAKIQQYISHRNIREQQILTLFRENFEKSFTVMELVKIIYKNTPENLHEMAKHNLLLHLKKLEKEGKIFSNTDPDKKWKAHL

SEQ ID NO: 1308 - protein, 306 aa, Homo sapiens
ELHRAGQVAGGARRSRRESMELERIVSAALLAFVQTHLPEADLSGLDEVIFSYVLGVLEDLGPSGPSEENFDMEAFTEMMEAYVPGFAHIPRGTIGDMMQKLSGQLSDARNKENLQPQSSGVQGQVPISPEPLQRPEMLKEETRSSAAAAADTQDEATGAEEELLPGVDVLLEVFPTCSVEQAQWVLAKARGDLEEAVQMLVEGKEEGPAAWEGPNQDLPRRLRGPQKDELKSFILQKYMMVDSAEDQKIHRPMAPKEAPKKLIRYIDNQVVSTKGERFKDVRNPEAEEMKATYINLKPARKYRFH

SEQ ID NO: 1309 - protein, 174 aa, Homo sapiens
FITGKGIVAILRCLQFNETLTELRFHNQRHMLGHHAEMEIARLLKANNTLLKMGYHFELPGPRMVVTNLLTRNQDKQRQKRQEEQKQQQLKEQKKLIAMLENGLGLPPGMWELLGGPKPDSRMQEFFQPPPPRPPNPQNVPFSQRSEMMKKPSQAPKYRTDPDSFRVVKLKRIQ

SEQ ID NO: 1310 - protein, 616 aa, Homo sapiens
  misc_feature (1)...(616): Xaa = any amino acid or other as shown in Table 3
GGRAGTQCCWRAGARLRGISPSPALPEAPGLCRVRAGLGAGALGRSPAGRRRRGPRVSSSPAPHPRRVLCRCLLFLFFSCHDRRGDSQPYQALKYSSKSHPSSGDHRHEKMRDAGDPSPPNKMLRRSDSPENKYSDSTGHSKAKNVHTHRVRERDGGTSYSPQENSHNHSALHSSNFTFFLIPSNXPQGKTFRIAPYDSADDWSLEHISSSGEKYYYNCRTEVSQWGKTPKSGLERGQRQKEANKMAVNSFPKDRDYRREVMQATATSGFASGKSTSGDKPVSHSCTTPSTSSASGLNPTSAPPTSASAVPVSPVPQSPIPPLLQDPNLLRQLLPALEATLQLNNSNVDISIINEVLTGDVTQASLQTIIHKCLTAGPSVFKITSLISQAAQLSTQAQASNQSPMSLTSDASSPRSYVSPRNKAHLKLNTVPIQTFGFSTPPVSSQPKVSTPVVKQGPVSQSATQQPVTADKQQGHEPVSPRSLQRSSSQRSPSPGPNHTSNSSNASNATVVPQNSSARSTCSLTPALAAHFSENLIKHVQGWPADHAEKQASRLREEAHNMGTIHMSEICTELKNLRSLVRVCEIQATLREQRILFLRQQIKELEKLKNQNSFMV

SEQ ID NO: 1311 - protein, 387 aa, Homo sapiens
VAPECRGAYPFRAMMPGTALKAVLLAVLLVGLQTATGRLLSGQPVCRGGTQRPCYKVIYFHDTSRRLNFEEAKEACRRDGGQLVSIESEDEQKLIEKFIENLLPSDGDFWIGLRRREEKQSNSTACQDLYAWTDGSISQFRNWYVDEPSCGSEVCVVMYHQPSAPAGIGGPYMFQWNDDRCNMKNNFICKYSDEKPAVPSREAEGEETELTTPVLPEETQEEDAKKTFKESREAALNLAYILIPSIPLLLLLVVTTVVCWVWICRKRKREQPDPSTKKQHTIWPSPHQGNSPDLEVYNVIRKQSEADLAETRPDLKNISFRVCSGEATPDDMSCDYDNMAVNPSESGFVTLVSVESGFVTNDIYEFSPDQMGRSKESGWVENEIYGY

SEQ ID NO: 1312 - protein, 470 aa, Homo sapiens
TEWGLSGSCPGCSPLEPGSRGRGAAAWRILRCRRLPEPSPFLTQPNLAQSQPPAPVPVTDPSVTMHPAVFLSLPDLRCSLLLLVTWVFTPVTTEITSLDTENIDEILNNADVALVNFYADWCRFSQMLHPIFEEASDVIKEEFPNENQVVFARVDCDQHSDIAQRYRISKYPTLKLFRNGMMMKREYRGQRSVKALADYIRQQKSDPIQEIRDLAEITTLDRSKRNIIGYFEQKDSDNYRVFERVANILHDDCAFLSAFGDVSKPERYSGDNIIYKPPGHSAPDMVYLGAMTNFDVTYNWIQDKCVPLVREITFENGEELTEEGLPFLILFHMKEDTESLEIFQNEVARQLISEKGTINFLHADCDKFRHPLLHIQKTPADCPVIAIDSFRHMYVFGDFKDVLIPGKLKQFVFDLHSGKLHREFHHGPDPTDTAPGEQAQDVASSPPESSFQKLAPSEYRYTLLRDRDEL

SEQ ID NO: 1313 - protein, 262 aa, Homo sapiens
LTPSVGPVFPGRPTRPLASPFPVPLHRCSAGSQPPGPVPEGLIRIYSMRFCPYSHRTRLVLKAKDIRHEVVNINLRNKPEWYYTKHPFGHIPVLETSQCQLIYESVIACEYLDDAYPGRKLFPYDPYERARQKMLLELFCKVPHLTKECLVALRCGRECTNLKAALRQEFSNLEEILEYQNTTFFGGTCISMIDYLLWPWFERLDVYGILDCVSHTPALRLWISAMKWDPTVCALLMDKSIFQGFLNLYFQNNPNAFDFGLC

SEQ ID NO: 1314 - protein, 173 aa, Homo sapiens
NTATNMTQPNAGTRKYSVPAISVHTSSSSFAYDREFLRTLPGFLIVAEIVLGLLVWTLIAGTEYFRVPAFGWVMFVAVFYWVLTVFFLIIYITMTYTRIPQVPWTTVGLCFNGSAFVLYLSAAVVDASSVSPERDSHNFNSWAASSFFAFLVTICYAGNTYFSFIAWRSRTIQ

SEQ ID NO: 1315 - protein, 259 aa, Homo sapiens
GLRDPFRRKRRLKPQVKMSNYVNDMWPGSPQEKDSPSTSRSGGSSRLSSRSRSRSFSRSSRSHSRVSSRFSSRSRRSKSRSRSRRRHQRKYRRYSRSYSRSRSRSRSRRYRERRYGFTRRYYRSPSRYRSRSRSRSRSRGRSYCGRAYAIARGQRYYGFGRTVYPEEHSRWRDRSRTRSRSRTPFRLSEKDRMELLEIAKTNAAKALGTTNIDLPASLRTVPSAKETSRGIGVSSNGAKPEVSILGLSEQNFQKANCQI

SEQ ID NO: 1316 - protein, 678 aa, Homo sapiens
AEGSTMDLTKMGMIQLQNPNHPTGLLCKANQMRLAGTLCDVVIMVDSQEFHAHRTVLACTSKMFEILFHRNSQHYTLDFLSPKTFQQILEYAYTATLQAKAEDLDDLLYAAEILEIEYLEEQCLKMLETIQASDDNDTEATMADGGAEEKKDRKARYLKNIFISKHSSEESGYASVAGQSLPGPMVDQSPSVSTSFGLSAMSPTKAAVDSLMTIGQSLLQGTLQPPAGPEEPTLAGGGRHPGVAEVKTEMMQVDEVPSQDSPGAAESSISGGMGDKVEERGKEGPGTPTRSSVITSARELHYGREESAEQVPPPAEAGQAPTGRPEHPAPPPEKHLGIYSVLPNHKADAVLSMPSSVTSGLHVQPALAVSMDFSTYGGLLPQGFIQRELFSKLGELAVGMKSESRTIGEQCSVCGVELPDNEAVEQHRKLHSGMKTYGCELCGKRFLDSLRLRMHLLAHSAGAKAFVCDQCGAQFSKEDALETHRQTHTGTDMAVFCLLCGKRFQAQSALQQHMEVHAGVRSYICSECNRTFPSHTALKRHLRSHTGDHPYECEFCGSCFRDESTLKSHKRIHTGEKPYECNGCGKKFSLKHQLETHYRVHTGEKPFECKLCHQRSRDYSAMIKHLRTHNGASPYQCTICTEYCPSLSSMQKHMKGHKPEEIPPDWRIEKTYLYLCYV

SEQ ID NO: 1317 - protein, 74 aa, Homo sapiens
IWEAPTLIFTLAGGRALGHPPMQKGSQGCALPHPLPGASLPAQPGPADHRGWECRIGGEASVFTHLFCLPHSPT

SEQ ID NO: 1318 - protein, 351 aa, Homo sapiens
ASGSPAPSSSSAMAAACGPGAAGYCLLLGLHLFLLTAGPALGWNDPDRMLLRDVKALTLHYDRYTTSRRLDPIPQLKCVGGTAGCDSYTPKVIQCQNKGWDGYDVQWECKTDLDIAYKFGKTVVSCEGYESSEDQYVLRGSCGLEYNLDYTELGLQKLKESGKQHGFASFSDYYYKWSSADSCNMSGLITIVVLLGIAFVVYKLFLSDGQYSPPPYSEYPPFSHRYQRFTNSAGPPPPGFKSEFTGPQNTGHGATSGFGSAFTGQQGYENSGPGFWTGLGTGGILGYLFGSNRAATPFSDSWYYPSYPPSYPGTWNRAYSPLHGGSGSYSVCSNSDTKTRTASGYGGTRRR

SEQ ID NO: 1319 - protein, 310 aa, Homo sapiens
GRCGAMAAGLARLLLLLGLSAGGPAPAGAAKMKVVEEPNAFGVNNPFLPQASRLQAKRDPSPVSGPVHLFRLSGKCFSLVESTYKYEFCPFHNVTQHEQTFRWNAYSGILGIWHEWEIANNTFTGMWMRDGDACRSRSRQSKVELACGKSNRLAHVSEPSTCVYALTFETPLVCHPHALLVYPTLPEALQRQWDQVEQDLADELITPQGHEKLLRTLFEDAGYLKTPEENEPTQLEGGPDSLGFETLENCRKAHKELSKEIKRLKGLLTQHGIPYTRPTETSNLEHLGHETPRAKSPEQLRGDPGLRGSL

SEQ ID NO: 1320 - protein, 313 aa, Homo sapiens
NSFWSVLFLVQEETEVARCNAQHRLRQSRDSKPDPSFRSQPIDSSISFAGSDIQPLFSFASVDGTQVGEAEEWAGPWAEATLLPGPGNRWPPRAGLSGNWLEEDGDWPSLPEVVGFVSERELFRDALGAGCRILLICEMQLTHQLDLFPECRVTLLLFKDVKNAGDLRRKAMEGTIDGSLINPTVIVDPFQILVAANKAVHLYKLGKMKTRTLSTEIIFNLSPNNNISEALKKFGISANDTSILIVYIEEGEKQINQEYLISQVEGHQVSLKNLPEIMNITEVKKIYKLSSQEESIGTLLDAIICRMSTKDVL

SEQ ID NO: 1321 - protein, 891 aa, Homo sapiens
QRSWAGPGAGPEAGTRPPARGRRRQPGNVDPRRRAPQLRSQMQVAMARATTATGNRLWPGLLIMLGSLCHRGSPCGLSTHIEIGHRALEFLQLHNGRVNYRELLLEHQDAYQAGIVFPDCFYPSICKGGKFHDVSESTHWTPFLNASVHYIRENYPLPWEKDTEKLVAFLFGITSHMAADVSWHSLGLEQGFLRTMGAIDFHGSYSEAHSAGDFGGDVLSQFEFNFNYLARRWYVPVKDLLGIYEKLYGRKVITENVIVDCSHIQFLEMYGEMLAVSKLYPTYSTKSPFLVEQFQEYFLGGLDDMAFWSTNIYHLTIFMLENGTSDCNLPENPLFIACGGQQNHTQGSKMQKNDFHRNLTTSLTESVDRNINYTERGVFFSVNSWTPDSMSFIYKALERNIRTMFIGGSQLSQKHVSSPLASYFLSFPYARLGWAMTSADLNQDGHGDLVVGAPGYSRPGHIHIGRVYLIYGNDLGLPPVDLDLDKEAHRILEGFQPSGRFGSALAVLDFNVDGVPDLAVGAPSVGSEQLTYKGAVYVYFGSKQGGMSSSPNITISCQDIYCNLGWTLLAADVNGDSEPDLVIGSPFAPGGGKQKGIVAAFYSGPSLSDKEKLNVEAANWTVRGEEDFSWFGYSLHGVTVDNRTLLLVGSPTWKNASRLGHLLHIRDEKKSLGRVYGYFPPNGQSWFTISGDKAMGKLGTSLSSGHVLMNGTLKQVLLVGAPTYDDVSKVAFLTVTLHQGGATRMYALTSDAQPLLLSTFSGDRRFSRFGGVLHLSDLDDDGLDEIIMAAPLRIADVTSGLIGGEDGRVYVYNGKETTLGDMTGKCKSWITPCPEEKAQYVLISPEASSRFGSSLITVRSKAKNQVVIAAGRSSLGARLSGALHVYSLGSD

SEQ ID NO: 1322 - protein, 119 aa, Homo sapiens
SLRNSARGLKMAASAARGAAALRRSINQPVAFVRRIPWTAASSQLKEHFAQFGHVRRCILPFDKETGFHRGLGWVQFSSEEGLRNALQQENHIIDGVKVQVHTRRPKLPQTSDDEKKDF

SEQ ID NO: 1323 - protein, 257 aa, Homo sapiens
GSSNIHSASTHGFCHWFSSPSTLKRQKQAIRFQKIRRQMEAPGAPPRTLTWEAMEQIRYLHEEFPESWSVPRLAEGFDVSTDVIRRVLKSKFLPTLEQKLKQDQKVLKKAGLAHSLQHLRGSGNTSKLLPAGHSVSGSLLMPGHEASSKDPNHSTALKVIESDTHRTNTPRRRKGRNKEIQDLEESFVPVAAPLGHPRELQKYSSDSESPRGTGSGALPSGQKLEELKAEEPDNFSSKVVQRGREFFDSNGNFLYRI

SEQ ID NO: 1324 - protein, 273 aa, Homo sapiens
ETRVKTSLELLRTQLEPTGTVGNTIMTSQPVPNETIIVLPSNVINFSQAEKPEPTNQGQDSLKKHLHAEIKVIGTIQILCGMMVLSLGIILASASFSPNFTQVTSTLLNSAYPFIGPFFFIISGSLSIATEKRLTKLLVHSSLVGSILSALSALVGFIILSVKQATLNPASLQCELDKNNIPTRSYVSYFYHDSLYTTDCYTAKASLAGTLSLMLICTLLEFCLAVLTAVLRWKQAYSDFPGSVLFLPHSYIGNSGMSSKMTHDCGYEELLTS

SEQ ID NO: 1325 - protein, 477 aa, Homo sapiens
EMVGAMWKVIVSLVLLMPGPCDGLFRSLYRSVSMPPKGDSGQPLFLTPYIEAGKIQKGRELSLVGPFPGLNMKSYAGFLTVNKTYNSNLFFWFFPAQIQPEDAPVVLWLQGGPGGSSMFGLFVEHGPYVVTSNMTLRDRDFPWTTTLSMLYIDNPVGTGFSFTDDTHGYAVNEDDVARDLYSALIQFFQIFPEYKNNDFYVTGESYAGKYVPAIAHLIHSLNPVREVKINLNGIAIGDGYSDPESIIGGYAEFLYQIGLLDEKQKKYFQKQCHECIEHIRKQNWFEAFEILDKLLDGDLTSDPSYFQNVTGCSNYYNFLRCTEPEDQLYYVKFLSLPEVRQAIHVGNQTFNDGTIVEKYLREDTVQSVKPWLTEIMNNYKVLIYNGQLDIIVAAALTERSLMGMDWKGSQEYKKAEKKVWKIFKSDSEVAGYIRQAGDFHQVIIRGGGHILPYDQPLRAFDMINRFIYGKGWDPYVG

SEQ ID NO: 1326 - protein, 160 aa, Homo sapiens
RDERAKVPFRSTEGGRRRRRRMEAVVFVFSLLDCCALIFLSVYFIITLSDLECDYINARSCCSKLNKWVIPELIGHTIVTVLLLMSLHWFIFLLNLPVATWNIYRYIMVPSGNMGVFDPTEIHNRGQLKSHMKEAMIKLGFHLLCFFMYLYSMILALIND

SEQ ID NO: 1327 - protein, 131 aa, Homo sapiens
QSPGHGAPCQLSSSHSRSNRLLSPMARATLSAAPSNPRLLRVALLLLLLVAASRRAAGAPLATELRCQCLQTLQGIHLKNIQSVKVKSPGPHCAQTEVIATLKNGQKACLNPASPMVKKIIEKMLKNGKSN

SEQ ID NO: 1328 - protein, 44 aa, Homo sapiens
HPLSLVFLALNTGKEKSHPGGGGERPGLAGQGEPDHPAGARDGR

SEQ ID NO: 1329 - protein, 525 aa, Homo sapiens
CTPVARSMATTATCTRFTDDYQLFEELGKGAFSVVRRCVKKTSTQEYAAKIINTKKLSARDHQKLEREARICRLLKHPNIVRLHDSISEEGFHYLVFDLVTGGELFEDIVAREYYSEADASHCIHQILESVNHIHQHDIVHRDLKPENLLLASKCKGAAVKLADFGLAIEVQGEQQAWFGFAGTPGYLSPEVLRKDPYGKPVDIWACGVILYILLVGYPPFWDEDQHKLYQQIKAGAYDFPSPEWDTVTPEAKNLINQMLTINPAKRITADQALKHPWVCQRSTVASMMHRQETVECLRKFNARRKLKGAILTTMLVSRNFSAAKSLLNKKSDGGVKPQSNNKNSLVSPAQEPAPLQTAMEPQTTVVHNATDGIKGSTESCNTTTEDEDLKVRKQEIIKITEQLIEAINNGDFEAYTKICDPGLTSFEPEALGNLVEGMDFHKFYFENLLSKNSKPIHTTILNPHVHVIGEDAACIAYIRLTQYIDGQGRPRTSQSEETRVWHRRDGKWLNVHYHCSGAPAAPLQ

SEQ ID NO: 1330 - protein, 205 aa, Homo sapiens
NRRTVKMLLELSEEHKEHLAFLPQVDSAVVAEFGRIAVEFLRRGANPKIYEGAARKLNVSSDTVQHGVEGLTYLLTESSKLMISELDFQDSVFVLGFSEELNKLLLQLYLDNRKEIRTILSELAPSLPSYHNLEWRLDVQLASRSLRQQIKPAVTIKLHLNQNGDHNTKVLQTDPATLLHLVQQLEQALEEMKTNHCRRVVRNIK

SEQ ID NO: 1331 - protein, 78 aa, Homo sapiens
GTSIYLAHRVARAWELAQFIHHTSKKADVVLACGDSIVHPEDLICCPLTGRSCLCDVHLLSSLLARLGRGYAVSLTNL

SEQ ID NO: 1332 - protein, 274 aa, Homo sapiens
RGCGSCGYKPSAGPAWRPRPPPAVSPLRHPEPAKVLSFSSCPLPALGRTGPSRAARAQSLTMASLFKKKTVDDVIKEQNRELRGTQRAIIRDRAALEKQEKQLELEIKKMAKIGNKEACKVLAKQLVHLRKQKTRTFAVSSKVTSMSTQTKVMNSQMKMAGAMSTTAKTMQAVNKKMDPQKTLQTMQNFQKENMKMEMTEEMINDTLDDIFDGSDDEEESQDIVNQVLDEIGIEISGKMAKAPSAARSLPSASTSKATISDEEIERQLKALGVD

SEQ ID NO: 1333 - protein, 157 aa, Homo sapiens
STDGNGAERLFAELRKMNARGLGSELKDSIPVTELSASGPFESHDLLRKGFSCVKNELLPSHPLELSEKNFQLNQDKMNFSTLRNIQGLFAPLKLQMEFKAVQQVQRLPFLSSSNLSLDVLRGNDETIGFEDILNDPSQSEVMGEPHLMVEYKLGLL

SEQ ID NO: 1334 - protein, 193 aa, Homo sapiens
  misc_feature (1)...(193): Xaa = any amino acid or other as shown in Table 3
RNMKLHYVAVLTLAILMFLTWLPESLSCNKALCASDVSKCLIQELCQCRPGEGNCSCCKECMLCLGALWDECCDCVGMCNPRNYSDTPPTSKSTVEELHEPIPSLFRALTEGDTQLNWNIVSFPVAEELSHHENLVSFLETVNQPHHQNVSVPSNNVHAPYSSDKEXLPTVDFFHSAPSCGLSMXSIIFFEET

SEQ ID NO: 1335 - protein, 179 aa, Homo sapiens
VGGVPTWLEGCGSGNPSPRSGGGPGARLTLPALQMTVHNLYLFDRNGVCLHYSEWHRKKQAGIPKEEEYKLMYGMLFSIRSFVSKMSPLDMKDGFLAFQTSRYKLHYYETPTGIKVVMNTDLGVGPIRDVLHHIYSALYVELVVKNPLCPLGQTVQSELFRSRLDSYVRSLPFFSARAG

SEQ ID NO: 1336 - protein, 236 aa, Homo sapiens
PGLSQEPSGSMETVVIVAIGVLATIFLASFAALVLVCRQRYCRPRDLLQRYDSKPIVDLIGAMETQSEPSELELDDVVITNPHIEAILENEDWIEDASGLMSHCIAILKICHTLTEKLVAMTMGSGAKMKTSASVSDIIVVAKRISPRVDDVVKSMYPPLDPKLLDARTTALLLSVSHLVLVTRNACHLTGGLDWIDQSLSAAEEHLEVLREAALASEPDKGLPGPEGFLQEQSAI

SEQ ID NO: 1337 - protein, 161 aa, Homo sapiens
VGMELPAVNLKVILLGHWLLTTWGCIVFSGSYAWANFTILALGVWAVAQRDSIDAISMFLGGLLATIFLDIVHISIFYPRVSLTDTGRFGVGMAILSLLLKPLSCCFVYHMYRERGGELLVHTGFLGSSQDRSAYQTIDSAEAPADPFAVPEGRSQDARGY

SEQ ID NO: 1338 - protein, 200 aa, Homo sapiens
PASRPLLGPDTGSVANIFKGLVILPEMSLVIRNLQRVIPIRRAPLRSKIEIVRRILGVQKFDLGIICVDNKNIQHINRIYRDRNVPTDVLSFPFHEHLKAGEFPQPDFPDDYNLGDIFLGVEYIFHQCKENEDYNDVLTVTATHGLCHLLGFTHGTEAEWQQMFQKEKAVLDELGRRTGTRLQPLTPGPLPEGAEGRVPF

SEQ ID NO: 1339 - protein, 267 aa, Homo sapiens
LRNALDVLHREVPRVLVNLVDFLNPTIMRQVFLGNPDKCPVQQAMLEPLGSKTETLDLRAEMPITCPTQNEPFLRTPRNSNYTYPIKPAIENWGSDFLCTEWKASNSVPTSVHQLRPADIKVVAALGDSLTTAVGARPNNSSDLPTSWRGLSWSIGGDGNLETHTTLPNILKKFNPYLLGFSTSTWEGTAGLNVAAEGARARDMPAQAWDLVERMKNSPDINLEKDWKLVTLFIGGNDLCHYCENPEAHLATEYVQHIQQALDILSE

SEQ ID NO: 1340 - protein, 286 aa, Homo sapiens
VVEFLWSRRPSGSSDPRPRRPASKCQMMEERANLMHMMKLSIKVLLQSALSLGRSLDADHAPLQQFFVVMEHCLKHGLKVKKSFIGQNKSFFGPLELVEKLCPEASDIATSVRNLPELKTAVGRGRAWLYLALMQKKLADYLKVLIDNKHLLSEFYEPEALMMEEEGMVIVGLLVGLNVLDANLCLKGEDLDSQVGVIDFSLYLKDVQDLDGGKEHERITDVLDQKNYVEELNRHLSCTVGDLQTKIDGLEKTNSKLQERVSAATDRICSLQEEQQQLREQNELIR

SEQ ID NO: 1341 - protein, 233 aa, Homo sapiens
KPEGARRVQFVMGLFGKTQEKPPKELVNEWSLKIRKEMRVVDRQIRDIQREEEKVKRSVKDAAKKGQKDVCIVLAKEMIRSRKAVSKLYASKAHMNSVLMGMKNQLAVLRVAGSLQKSTEVMKAMQSLVKIPEIQATMRELSKEMMKAGIIEEMLEDTFESMDDQEEMEEEAEMEIDRILFEITAGALGKAPSKVTDALPEPEPPGAMAASEDEEEEEEALEAMQSRLATLRS

SEQ ID NO: 1342 - protein, 150 aa, Homo sapiens
RWNSIMELALLCGLVVMAGVIPIQGGILNLNKMVKQVTGKMPILSYWPYGCHCGLGGRGQPKDATDWCCQTHDCCYDHLKTQGCGIYKDYYRYNFSQGNIHCSDKGSWCEQQLCACDKEVAFCLKRNLDTYQKRLRFYWRPHCRGQTPGC

SEQ ID NO: 1343 - protein, 127 aa, Homo sapiens
KTVAEEASVGNPEGAFMKMLQARKQHMSTELTIESEAPSDSSGINLSGFGSEQLDTNDESDVSSALSYILPYLSLRNLGAESILLPFTEQLFSNVQDGDRLLSILKNNRKSPSQSSLLGNKFKNKIF

SEQ ID NO: 1344 - protein, 126 aa, Homo sapiens
LPLTLLLAAPFAHLLLPPGHDQSPCWHPGPALSPGTLGPLSWAMANSGLQLLGYFLALGGWVGIIASTALPQWKQSSYAGDASIQLRSKVFVLESEWGGDSLGLPRDCGWSCLLHSAVRSEKGFWS

SEQ ID NO: 1345 - protein, 328 aa, Homo sapiens
DPRVRPPLLQPPPPLLPRLVILKMAPLDLDKYVEIARLCKYLPENDLKRLCDYVCDLLLEESNVQPVSTPVTVCGDIHGQFYDLCELFRTGGQVPDTNYIFMGDFVDRGYYSLETFTYLLALKAKWPDRITLLRGNHESRQITQVYGFYDECQTKYGNANAWRYCTKVFDMLTVAALIDEQILCVHGGLSPDIKTLDQIRTIERNQEIPHKGAFCDLVWSDPEDVDTWAISPRGAGWLFGAKVTNEFVHINNLKLICRAHQLVHEGYKFMFDEKLVTVWSAPNYCYRCGNIASIMVFKDVNTREPKLFRAVPDSERVIPPRTTTPYFL

SEQ ID NO: 1346 - protein, 253 aa, Homo sapiens
SFAGAAARPSTPPASGRGAAPGRPGPSPMDLRAGDSWGMLACLCTVLWHLPAVPALNRTGDPGPGPSIQKTYDLTRYLEHQLRSLAGTYLNYLGPPFNEPDFNPPRLGAETLPRATVDLEVWRSLNDKLRLTQNYEAYSHLLCYLRGLNRQAATAELRRSLAHFCTSLQGLLGSIAGVMAALGYPLPQPLPGTEPTWTPGPAHSDFLQKMDDFWLLKELQTWLWRSAKDFNRLKKKMQPPAAAVTLHLGAHGF

SEQ ID NO: 1347 - protein, 195 aa, Homo sapiens
IKISLKKRSMSGISGCPFFLWGLLALLGLALVISLIFNISHYVEKQRQDKMYSYSSDHTRVDEYYIEDTPIYGNLDDMISEPMDENCYEQMKARPEKSVNKMQEATPSAQATNETQMCYASLDHSVKGKRRKPRKQNTHFSDKDGDEQLHAIDASVSKTTLVDSFSPESQAVEENIHDDPIRLFGLIRAKREPIN

SEQ ID NO: 1348 - protein, 268 aa, Homo sapiens
VEFHPQRARAGARAPSMGVLLTQRTLLSLVLALLFPSMASMAAIGSCSKEYRVLLGQLQKQTDLMQDTSRLLDPYIRIQGLDVPKLREHCRERPGAFPSEETLRGLGRRCFLQTLNATLGCVLHRLADLEQRLPKAQDLERSGLNIEDLEKLQMARPNILGLRNNIYCMAQLLDNSDTAEPTKAGRGASQPPTPTPASDAFQRKLEGCRFLHGYHRFMHSVGRVFSKWGESPNRSRRHSPHQALRKGVRRTRPSRKGKRLMTRGQLPR

SEQ ID NO: 1349 - protein, 138 aa, Homo sapiens
DFPGRRFRLVWLLVLRLPWRVPGQLDPTTGRRFSEHKLCADDECSMLMYRGEALEDFTGPDCRFVNFKKGDPVYVYYKLARGWPEVWAGSVGRTFGYFPKDLIQVVHEYTKEELQVPTNETDFVCFDGGRDDFHNYNV

SEQ ID NO: 1350 - protein, 236 aa, Homo sapiens
SPLGKEGQEEVRVKIKDLNEHIVCCLCAGYFVDATTITECLHTFCKSCIVKYLQTSKYCPMCNIKIHETQPLLNLKLDRVMQDIVYKLVPGLQDSEEKRIREFYQSRGLDRVTQPTGEEPALSNLGLPFSSFDHSKAHYYRYDEQLNLCLERLSSGKDKNKSVLQNKYVRCSVRAEVRHLRRVLCHRLMLNPQHVQLLFDNEVLPDHMTMKQIWLSRWFGKPSPLLLQYSVKEKRR

SEQ ID NO: 1351 - protein, 178 aa, Homo sapiens
LWWYSAHAAVDAMMDVFGVGFPSKVPWKKMSAEELENQYCPSRWVVRLGAEEALRTYSQIGIEATTRARATRKSLLHVPYGDGEGEKVDIYFPDESSEATTRARATRKSLLHVPYGDGEGEKVDIYFPDESSEALPFFLFFHGGYWQSGRHPGPHGRPGDPQRCVCPEAVSKQQAFSW

SEQ ID NO: 1352 - protein, 284 aa, Homo sapiens
GVRMASRGRRPEHGGPPELFYDETEARKYVRNSRMIDIQTRMAGRALELLYLPENKPCYLLDIGCGTGLSGSYLSDEGHYWVGLDISPAMLDEAVDREIEGDLLLGDMGQGIPFKPGTFDGCISISAVQWLCNANKKSENPAKRLYCFFASLFSVLVRGSRAVLQLYPENSEQLELITTQATKAGFSGGMVVDYPNSAKAKKFYLCLFSGPSTFIPEGLSENQDEVEPRESVFTNERFPLRMSRRGMVRKSRAWVLEKKERHRRQGREVRPDTQYTGRKRKPRF

SEQ ID NO: 1353 - protein, 363 aa, Homo sapiens
TLICRMAGCGEIDHSINMLPTNRKANESCSNTAPSLTVPECAICLQTCVHPVSLPCKHVFCYLCVKGASWLGKRCALCRQEIPEDFLDKPTLLSPEELKAASRGNGEYAWYYEGRNGWWQYDERTSRELEDAFSKGKKNTEMLIAGFLYVADLENMVQYRRNEHGRRRKIKRDIIDIPKKGVAGLRLDCDANTVNLARESSADGADSVSAQSGASVQPLVSSVRPLTSVDGQLTSPATPSPDASTSLEDSFAHLQLSGDNTAERSHRGEGEEDHESPSSGRVPAPDTSIEETESDASSDSEDVSAVVAQHSLTQQRLLVSNANQTVPDRSDRSGTDRSVAGGGTVSVSVRSRRPDGQCTVTEV

SEQ ID NO: 1354 - protein, 368 aa, Homo sapiens
GATPLGSVGGRTGKMDAATLTYDTLRFAEFEDFPETSEPVWILGRKYSIFTEKDEILSDVASRLWFTYRKNFPAIGGTGPTSDTGWGCMLRCGQMIFAQALVCRHLGRDWRWTQRKRQPDSYFSVLNAFIDRKDSYYSIHQIAQMGVGEGKSIGQWYGPNTVAQVLKKLAVFDTWSSLAVHIAMDNTVVMEEIRRLCRTSVPCAGATAFPADSDRHCNGFPAGAEVTNRPSPWRPLVLLIPLRLGLTDINEAYVETLKHCFMMPQSLGVIGGKPNSAHYFIGYVGEELIYLDPHTTQPAVEPTDGCFIPDESFHCQHPPCRMSIAELDPSIAVVRGGHLSTQAFGAECCLGMTRKTFGFLRFFFSMLG

SEQ ID NO: 1355 - protein, 117 aa, Homo sapiens
PTTSNRAITLTAWPKIPFLGICEAKNPRSENMRLATILEVACHHLGSGPPPSWELWEQGPPGNSSRYIEFLNKHTYIKGTLRVYTKKFCMLVIKSFESKSCVCVYDFDSKSSVNVTV

SEQ ID NO: 1356 - protein, 126 aa, Homo sapiens
PRVRFRLLHVTSIRSAWILCGIIWILIMASSIMLLDSGSEQNGSVTSCLELNLYKIAKLQTVNYIALVVGCLLPFFTLSICYLLIIRVLLKVEVPESGLRVSHRKALTTIIITLIIFFLCFLPYHT

SEQ ID NO: 1357 - protein, 222 aa, Homo sapiens
GRHWLGSAQLTDGGSARKPKMAVPAALILRESPSMKKAVSLINAIDTGRFPRLLTRILQKLHLKAESSFSEEEEEKLQAAFSLEKQDLHLVLETISFILEQAVYHNVKPAALQQQLENIHLRQDKAEAFVNTWSSMGQETVEKFRQRILAPCKLETVGWQLNLQMAHSAQAKLKSPQAVLQLGVNNEDSKSLEKVLVEFSHKELFDFYNKLETIQAQLDSLT

SEQ ID NO: 1358 - protein, 116 aa, Homo sapiens
EASSAKTKRKEEKGPKAKMKLMVLVFTIGLTLLLGVQAMPANRLSCYRKILKDHNCHNLPEGVADLTQIDVNVQDHFWDGKGCEMICYCNFSELLCCPKDVFFGPKISFVIPCNNQ

SEQ ID NO: 1359 - protein, 466 aa, Homo sapiens
KMAEAVFHAPKRKRRVYETYESPLPIPFGQDHGPLKEFKIFRAEMINNNVIVRNAEDIEQLYGKGYFGKGILSRSRPSFTISDPKLVAKWKDMKTNMPIITSKRYQHSVEWAAELMRRQGQDESTVRRILKDYTKPLEHPPVKRNEEAQVHDKLNSGMVSNMEGTAGGERPSVVNGDSGKSGGVGDPREPLGCLQEGSGCHPTTESFEKSVREDASPLPHVCCCKQDALILQRGLHHEDGSQHIGLLHPGDRGPDHEYVLVEEAECAMSEREAAPNEELVQRNRLICRRNPYRIFEYLQLSLEEAFFLVYALGCLSIYYEKEPLTIVKLWKAFTVVQPTFRTTYMAYHYFRSKGWVPKVGLKYGTDLLLYRKGPPFYHASYSVIIELVDDHFEGSLRRPLSWKSLAALSRVSVNVSKELMLCYLIKPSTMTDKEMESPECMKRIKVQEVILSRWVSSRERSDQDDL

SEQ ID NO: 1360 - protein, 419 aa, Homo sapiens
RDIWTMNLQRYWGEIPISSSQTNRSSFDLLPREFRLVEVHDPPLHQPSANKPKPPTMLDIPSEPCSLTIHTIQLIQHNRRLRNLIATAQAQNQQQTEGVKTEESEPLPSCPGSPPLPDDLLPLDCKNPNAPFQIRHSDPESDFYRGKGEPVTELSWHSCRQLLYQAVATILAHAGFDCANESVLETLTDVAHEYCLKFTKLLRFAVDREARLGQTPFPDVMEQVFHEVGIGSVLSLQKFWQHRIKDYHSYMLQISKQLSEEYERIVNPEKATEDAKPVKIKEEPVSDITFPVSEELEADLASGDQSLPMGVLGAQSERFPSNLEVEASPQASSAEVNASPLWNLAHVKMEPQESEEGNVSGHGVLGSDVFEEPMSGMSEAGIPQSPDDSDSSYGSHSTDSLMGSSPVFNQRCKKRMRKI

SEQ ID NO: 1361 - protein, 220 aa, Homo sapiens
REQILFIEIRDTAKGGETEQPPSLSPLHGGRMPEMGEGIQSLARETQSHRGRRQGWDATWVTRCRESLNRGGAGAGKRAGALAHHVFLALIEPNLAEREASEEEVKACSDETVVADLLVKVVYVLGAILKIFLREGNVLNQHSGMDIEKYSEHYQHDHSPGAEDDAAGGQLRPTAQERRHKEGSRGSPRCKRARKAVGESPGCPRPRVRPRVRPRVRPRV

SEQ ID NO: 1362 - protein, 82 aa, Homo sapiens
GTRGCCREGTAYAKAYQFMASHLSLGKPVSTGSIPRFNKALFNKQAKCKPNHYSFIGLSMLSPENFSIGCKYSVWFSETKGF

SEQ ID NO: 1363 - protein, 143 aa, Homo sapiens
GAQGVRVGIGEVGRVQAPRVSLLHSQGVPRGGTGEAVKEEGRGSSLHPPLPPQGLGEYAACQSHAFMKGVFTFVTGTGMAFGLQMFIQRKFPYPLQWSLLVAVVAGSVVSYGVTRVESEKCNNLWLFLETGQLPKDRSTDQRS

SEQ ID NO: 1364 - protein, 194 aa, Homo sapiens
  misc_feature (1)...(194): Xaa = any amino acid or other as shown in Table 3
GTSELLCIQRWNWGPAFPPRPGLALAPTLQLLVEMGSAKSVPVTPARPPPHNKHLARVADPRSPSAGILRTPIQVESSPQPGLPAGEQLEGLKHAQDSDPRSPLGKNXGHGWQVGQGSDLGSPQPLPPSASHLYSSRASRCSQPPCLSLPWFGVRSSPANTYHVPVTSLCPSPALHYTALQAGIISTSQARAPR

SEQ ID NO: 1365 - protein, 114 aa, Homo sapiens
  misc_feature (1)...(114): Xaa = any amino acid or other as shown in Table 3
PLLLPRFIDIPCLLCYLTQVTPDDMYAKAFLIKPNTAITGTDRRKLRADETTDFPTLGTDQIYELLPGKDELNIVKSNAHKRDAXTAYVSGENHILSEPXKNLYPAVNTLSSYP

SEQ ID NO: 1366 - protein, 80 aa, Homo sapiens
SRQPPPLLTMVFLLEFLFLVFFPGCVNQLLLSYPWQGQGTSLWSSLSFHWLLPQEDSSRLSIFPLRAGSPPQPAQAPQRI

SEQ ID NO: 1367 - protein, 301 aa, Homo sapiens
KSREQSSLFAADAERSWGGKSCCLLRWRFVGKASHFPRLLPLPGEERPETKERAWKMEQTWTRDYFAEDDGEMVPRTSHTAASVSLTAFLSDTKDRGPPVQSQIWRSGEKVPFVQTYSLRAFEKPPQVQTQALRDFEKHLNDLKKENFSLKLLIYFLEERMQQKYEASREDIYKRNTELKVEVESLKRELQDKKQHLDKTWADVENLNSQNEAELRRQFEERQQEMEHVYELLENKMQLLQEESRLAKNEAARMAALVEAEKECNLELSEKLKGVTKNWEDVPGDQVKPDQYTEALAQRDK

SEQ ID NO: 1368 - protein, 308 aa, Homo sapiens
  misc_feature (1)...(308): Xaa = any amino acid or other as shown in Table 3
TRRRGTTWRSPRPRRASTSRPSTRPRGVASWPWETAGTATTGPGPSARTRRRAARRRRSRPRRRAHGGLSQPAGWQSLLSFTILFLAWLAGFSSRLFAVIRFESIIHEFDPWFNYRSTHHLASHGFYEFLNWFDERAWYPLGRIVGGTVYPGLMITAGLIHWILNTLNITVHIRDVCVFLAPTFSGLTSISTFLLTRELWNQGAGLLAACFIAIVPGYISRSVAGSFDNEGIAIFALQFTYYLWVKSVKTGSVFWTMCCCLSYFYMVSAWGGYVFIINLIPLHAFVLVLMQRYSKRVYIXYSTFYIVG

SEQ ID NO: 1369 - protein, 212 aa, Homo sapiens
RRLIVVLSDAFLSRAWCSHSFRVGPARGWVGPSVAPTPLTVPPRREGLCRLLELTRRPIFITFEGQRRDPAHPALRLLRQHRHLVTLLLWRPGSVTPSSDFWKEVQLALPRKVRYRPVEGDPQTQLQDDKDPMLILRGRVPEGRALDSEVDPDPEGDLGVRGPVFGEPSAPPHTSGVSLGESRSSEVDVSDLGSRNYSARTDFYCLVSKDDM

SEQ ID NO: 1370 - protein, 281 aa, Homo sapiens
LSHEGWRRGREGERINSSVASLAPLCILPDLPSNMHLARLVGSCSLLLLLGALSGWAASDDPIEKVIEGINRGLSNAEREVGKALDGINSGITHAGREVEKVFNGLSNMGSHTGKELDKGVQGLNHGMDKVAHEINHGIGQAGKEAEKLGHGVNNAAGQAGKEADKAVQGFHTGVHQAGKEAEKLGQGVNHAADQAGKEVEKLGQGAHHAAGQAGKELQNAHNGVNQASKEANQLLNGNHQSGSSSHQGGATTTPLASGASVNTPFINLPALWRSVANIMP

SEQ ID NO: 1371 - protein, 119 aa, Homo sapiens
SASGGLGMTVEGPEGSEREHRPPEKPPRPPRPLHLSDRSFRRKKDSVESHPTWVDDTRIDADAIVEKIVQSQDFTDGSNTEDSNLRLFVSRDGSATLSGIQLATRVSSGVYEPVVIESH

SEQ ID NO: 1372 - protein, 108 aa, Homo sapiens
ERSGWPQPEGTVTAQGPLFWERLSGAVTVSSGYKADMWPSFPQVRVGSFLFGILFFSFGSSSLPPGLPPPASLLCCAVQWGARALFLPCLKERALGMEMRNNTLSFRQ

SEQ ID NO: 1373 - protein, 209 aa, Homo sapiens
  misc_feature (1)...(209): Xaa = any amino acid or other as shown in Table 3
SSSNLRLSFLINENILGKCFRSGPSCAGPRISPLAAQYECPRPSLLIMASVPKTNKIEPRSYSIIPSCGIRRLGPALNTLIFQSKRFGPRGHSAKSIEGAPRGKGRGRAVARLAADRPPAPKIQLRAFXLQQLXYTLLELELPRLLAPDLPSNGSSLKDLKWTHSNYRASKESCIVIFVTTSPGREWVICALAAFLGCGSLSQAPSPES

SEQ ID NO: 1374 - protein, 153 aa, Homo sapiens
LRIINTYFCFKFLIVNYIHGTTKARKPHVLGESLISAMSRQEPKMFVLLYVTSFAICASGQPRGNQLKGENYSPRYICSIPGLPGPPGPPGANGSPGPHGRIGLPGRDGRDGRKGEKGEKGTAGLRGKTGPLGLAGEKGDQGETGKKGPIGPE

SEQ ID NO: 1375 - protein, 149 aa, Homo sapiens
FASAMLGSRVDRPKLSVAPSVVLEEDQVLVSPAVDLEAGCRLRDFTEKIMNVKGKVILSMLVVSTVIIVFWEFINSTEGSFLWIYHSKNPEVDDSSAQKGWWFLSWFNNGIHNYQQGEEDIDKEKGREETKGRKMTQQSFGYGTGLIQT

SEQ ID NO: 1376 - protein, 416 aa, Homo sapiens
GSHRFSLASPLDPEVGPYCDTPTMRTLFNLLWLALACSPVHTTLSKSDAKKAASKTLLEKSQFSDKPVQDRGLVVTDLKAESVVLEHRSYCSAKARDRHFAGDVLGYVTPWNSHGYDVTKVFGSKFTQISPVWLQLKRRGREMFEVTGLHDVDQGWMRAVRKHAKGLHIVPRLLFEDWTYDDFRNVLDSEDEIEELSKTVVQVAKNQHFDGFVVEVWNQLLSQKRVGLIHMLTHLAEALHQARLLALLVIPPAITPGTDQLGMFTHKEFEQLAPVLDGFSLMTYDYSTAHQPGPNAPLSWVRACVQVLDPKSKWRSKILLGLNFYGMDYATSKDAREPVVGARYIQTLKDHRPRMVWDSQVSEHFFEYKKSRSGRHVVFYPTLKSLQVRLELARELGVGVSIWELGQGLDYFYDLL

SEQ ID NO: 1377 - protein, 316 aa, Homo sapiens
GREGTGWGPAMSEVTRSLLQRWGASFRRGADFDSWGQLVEAIDEYQILARHLQKEAQAQHNNSEFTEEQKKTIGKIATCLELRSAALQSTQSQEEFKLEDLKKLEPILKNILTYNKEFPFDVQPVPLRRILAPGEEENLEFEEDEEEGGAGAGSPDSFPARVPGTLLPRLPSEPGMTLLTIRIEKIGLKDAGQCINPYITVSVKDLNGIDLTPVQDTPVASRKEDTYVHFNVDIELQKHVEKLTKGAAIFFEFKHYKPKKRFTSTKCFAFMEMDEIKLGPIVIELYKKPTDFKRKQLQLLTKKPLYLHLHQTLHKE

SEQ ID NO: 1378 - protein, 90 aa, Homo sapiens
GSITSEPSLDSLQPLPPGFKRFSCLSLPSSWDYRRPPPGLAYFCIFSRDEVSPCWPGCSPSPDLMIRLPRPPSVGITGVSHRAWPTIDNF

SEQ ID NO: 1379 - protein, 332 aa, Homo sapiens
KMPVPWFLLSLALGRSPVVLSLERLVGPQDATHCSPGLSCRLWDSDILCLPGDIVPAPGPVLAPTHLQTELVLRCQKETDCDLCLRVAVHLAVHGHWEEPEDEEKFGGAADSGVEEPRNASLQAQVVLSFQAYPTARCVLLEVQVPAALVQFGQSVGSVVYDCFEAALGSEVRIWSYTQPRYEKELNHTQQLPDCRGLEVWNSIPSCWALPWLNVSADGDNVHLVLNVSEEQHFGLSLYWNQVQGPPKPRWHKNLVRPPPSQVHSHCRPCLCKDAVPYQRGSLKRTHPKQGKIGGGTSAFLVSLTLASSSSSLSSPTSFLYLFHRLDRRSLP

SEQ ID NO: 1380 - protein, 117 aa, Homo sapiens
LRLWNRNQMMHNIIVKELIVTFFLGITVVQMLISVTGLKGVEAQNGSESEVFVGKYETLVFYWPSLLCLAFLLGRFLHMFVKALRVHLGWELQVEEKSVLEVHQGEHVKQLLRIPRP

SEQ ID NO: 1381 - protein, 216 aa, Homo sapiens
KVNRKLRKKGKISHDKRKKSRSKAIGSDTSDIVHIWCPEGMKTSDIKELNIVLPEFEKTHLEHQQRIESKVCKAAIATFYVNVKEQFIKMLKESQMLTNLKRKNAKMISDIEKKRQRMIEVQDELLRLEPQLKQLQTKYDELKERKSSLRNAAYFLSNLKQLYQDYSDVQAQEPNVKETYDSSSLPALLFKARTLLGAESHLRNINHQLEKLLDQG

SEQ ID NO: 1382 - protein, 137 aa, Homo sapiens
  misc_feature (1)...(137): Xaa = any amino acid or other as shown in Table 3
VWVAMEEPPVREEEXEEGEEDEERDEVGPEGALGKSPFQLTAEDVYDISYLLGRELMALGSDPRVTQLQFKVVRVLEMLEALVNEGSLALEELKMERDHLRKEVEGLRRQSPPASGEWPDSTKRRPRRKKRKRCCGY

SEQ ID NO: 1383 - protein, 90 aa, Homo sapiens
PRNDHRLTQSRRDSSSKTRAFLVPRFLPAHAGVTSEERTAMKREGGAAHLCSDSLPESQQQDGNHAPNFSSHGSCRRRQRRRHDKALHAR

SEQ ID NO: 1384 - protein, 166 aa, Homo sapiens
THASEKSRATMSSWSRQRPKSPGGIQPHVSRTLFLLLLLAASAWGVTLSPKDCQVFRSDHGSSISCQPPAEIPGYLPADTVHLAVEFFNLTHLPANLLQGASKLQELHLSSNGLESLSPEFLRPVPQLRVLDLTRNALTGLPPGLFQASATLDTLVLKENQLEVLE

SEQ ID NO: 1385 - protein, 164 aa, Homo sapiens
ERPRIMDLAGLLKSQFLCHLVFCYVFIASGLIINTIQLFTLLLWPINKQLFRKINCRLSYCISSQLVMLLEWWSGTECTIFTDPRAYLKYGKENAIVVLNHKFEIDFLCGWSLSERFGLLGVSQKCIPPCLTHFFGSAPPLVFLLLVIQNLQKNQQSFYLMKWS

SEQ ID NO: 1386 - protein, 289 aa, Homo sapiens
MIVFGWAVFLASRSLGQGLLLTLEEHIAHFLGTGGAATTMGNSCICRDDSGTDDSVDTQQQQAENSAVPTADTRSQPRDPVRPPRRGRGPHEPRRKKQNVDGLVLDTLAVIRTLVDNDQEPPYSMITLHEMAETDEGWLDVVQSLIRVIPLEDPLGPAVITLLLDECPLPTKDALQKLTEILNLNGEVACQDSSHPAKHRNTSAVLGCLAEKLAGPASIGLLSPGILEYLLQCLLQSHPTVMLFALIALEKFAQTSENKLTISESSISDRLVTLESWANDPDYLKRQVG

SEQ ID NO: 1387 - protein, 320 aa, Homo sapiens
RFGTRGLAKSKGVVLMALCALTRALRSLNLAPPTVAAPAPSLFPAAQMMNNGLLQQPSALMLLPCRPVLTSVALNANFVSWKSRTKYTITPVKMRKSGGRDHTGRIRVHGIGGGHKQRYRMIDFLRFRPEETKSGPFEEKVIQVRYDPCRSADIALVAGGSRKRWIIATENMQAGDTILNSNHIGRMAVAAREGDAHPLGALPVGTLINNVESEPGRGAQYIRAAGTCGVLLRKVNGTAIIQLPSKRQMQVLETCVATVGRVSNVDHNKRVIGKAGRNRWLGKRPNSGRWHRKGGWAGRKIRPLPPMKSYVKLPSASAQS

SEQ ID NO: 1388 - protein, 140 aa, Homo sapiens
PVQGARCWLDARRNVRVFSGVCCGCGIHGYWAEPCGGCGAMEGLRSSVELDPELTPGKLDEEMVGLPPHDASPQVTFHSLDGKTVVCPHFMGLLLGLLLLLTLSVRNQLCVRGERQLAETLHSQVKEKSQLIGKKTDCRD

SEQ ID NO: 1389 - protein, 448 aa, Homo sapiens
GARGRPLAETWPFLTAPVLPGQLQITEPTMAEKGDCIASVYGYDLGGRFVDFQPLGFGVNGLVLSAVDSRACRKVAVKKIALSDARSMKHALREIKIIRRLDHDNIVKVYEVLGPKGTDLQGELFKFSVAYIVQEYMETDLARLLEQGTLAEEHAKLFMYQLLRGLKYIHSANVLHRDLKPANIFISTEDLVLKIGDFGLARIVDQHYSHKGYLSEGLVTKWYRSPRLLLSPNNYTKAIDMWAAGCILAEMLTGRMLFAGAHELEQMQLILETIPVIREEDKDELLRVMPSFVSSTWEVKRPLRKLLPEVNSEAIDFLEKILTFNPMDRLTAEMGLQHPYMSPYSCPEDEPTSQHPFRIEDEIDDIVLMAANQSQLSNWDTCSSRYPVSLSSDLEWRPDRCQDASEVQRDPRAGSAPLAENVQVDPRKDSHSSSASCQAGRNGVSRYQ

SEQ ID NO: 1390 - protein, 815 aa, Homo sapiens
MRTLGTCLATLAGLLLTAAGETFSGGCLFDEPYSTCGYSQSEGDDFNWEQVNTLTKPTSDPWMPSGSFMLVNASGRPEGQRAHLLLPQLKENDTHCIDFHYFVSSKSNSPPGLLNVYVKVNNGPLGNPIWNISGDPTRTWNRAELAISTFWPNFYQVIFEVITSGHQGYLAIDEVKVLGHPCTRTPHFLRIQNVEVNAGQFATFQCSAIGRTVAGDRLWLQGIDVRDAPLKEIKVTSSRRFIASFNVVNTTKRDAGKYRCMIRTEGGVGISNYAELVVKEPPVPIAPPQLASVGATYLWIQLNANSINGDGPIVAREVEYCTASGSWNDRQPVDSTSYKIGHLDPDTEYEISVLLTRPGEGGTGSPGPALRTRTKCADPMRGPRKLEVVEVKSRQITIRWEPFGYNVTRCHSYNLTVHYCYQVGGQEQVREEVSWDTENSHPQHTITNLSPYTNVSVKLILMNPEGRKESQELIVQTDEDLPGAVPTESIQGSTFEEKIFLQWREPTQTYGVITLYEITYKAVSSFDPEIDLSNQSGRVSKLGNETHFLFFGLYPGTTYSFTIRASTAKGFGPPATNQFTTKISAPSMPAYELETPLNQTDNTVTVMLKPAHSRGAPVSVYQIVVEEERPRRTKKTTEILKCYPVPIHFQNASLLNSQYYFAAEFPADSLQAAQPFTIGDNKTYNGYWNTPLLPYKSYRIYFQAASRANGETKIDCVQVATKGAATPKPVPEPEKQTDHTVKIAGVIAGILLFVIIFLGVVLVMKKRLYKHGASICSASGEASGSFQSWRKAKHKQACPMARAGARERAGGCLKL

SEQ ID NO: 1391 - protein, 142 aa, Homo sapiens
GIRQLLQLSRASMAARKSWTALRLCATVVVLDMVVCKGFVQDLDESFKENRNDDIWLVHFYAPWCGHCKKLEPIWNEAGLEMKSIGSPVKAGKMDATSYSSIASEFGVRGYPTIKLALIRPLPSQQMFEHMHKRHRVFFVYV

SEQ ID NO: 1392 - protein, 282 aa, Homo sapiens
GLVIVISHFSPSPGLLPATQSPAMSDPITLNVGGKLYTTSLATLTSFPDSMLGAMFSGKMPTKRDSQGNCFIDRDGKVFRYILNFLRTSHLDLPEDFQEMGLLRREADFYQVQPLIEALQEKEVELSKAEKNAMLNITLNQRVQTVHFTVREAPQIYSLSSSSMEVFNANIFSTSCLFLKLLGSKLFYCSNGNLSSITSHLQDPNHLTLDWVANVEGLPEEEYTKQNLKRLWVVPANKQINSFQVFVEEVLKIALSDGFCIDSSHPHALDFMNNKIIRLIRY

SEQ ID NO: 1393 - protein, 308 aa, Homo sapiens
SCADNLVAASGGCWFVLGERRAGSLLSASYGTFAMPGMVLFGRRWAIASDDLVFPGFFELVVRVLWWIGILTLYLMHRGKLDCAGGALLSSYLIVLMILLAVVICTVSAIMCVSMRGTICNPGPRKSMSKLLYIRLALFFPEMVWASLGAAWVADGVQCDRTVVNGIIATVVVSWIIIAATVVSIIIVFDPLGGKMAPYSSAGPSHLDSHDSSQLLNGLKTAATSVWETRIKLLCCCIGKDDHTRVAFSSTAELFSTYFSDTDLVPSDIAAGLALLHQQQDNIRNNQDLPRWSAMPQGAPRKLIWMQN

SEQ ID NO: 1394 - protein, 238 aa, Homo sapiens
FRAATAAAKGNGGGGGRAGAGDASGTRKKKGPGPLATAYLVIYNVVMTAGWLVIAVGLVRAYLAKGSYHSLYYSIEKPLKFFQTGALLEILHCAIGIVPSSVVLTSFQVMSRVFLIWAVTHSVKEVQSEDSVLFVIAWTITEIIRYSFYTFSLLNHLPYLIKRARYTLFIVLYPMGVSGELLTIYAALPFVRQAGLYSISLPNSTKKIFLISQVWWHMLAVSADAKAAEMPAVLKPGP

SEQ ID NO: 1395 - protein, 231 aa, Homo sapiens
MLTGVGCLVSSESLSCVQCNSWEKSCVNSIASECPSHANTSCISSSASSSLETPVRLYQNMFCSAENCSEETHITAFTVHVSAEEHFHFVSQCCEGKECSNTSDALDPPLKNVSSNAECPACYESNGTSCRGKPWKCYEEEQCVFLVAELKNDIESKSLVLKGCSNVSNATCQFLSGENKTLGGVIFRKFECANVNSLTPTSAPTTSHNVGSKASLYLLALASLLLRGLLP

SEQ ID NO: 1396 - protein, 216 aa, Homo sapiens
VPARRRAMEIGTEISRKIRSAIKGKLQELGAYVDEELPDYIMVMVANKKSQDQMTEDLSLFLGNNTIRFTVWLHGVLDKLRSVTTEPSSLKSSDTNIFDSNVPSNKSNFSRGDERRHEAAVPPLAIPSARPEKRDSRVSTSSQESKTTNVRQTYDDGAATRLMSTVKPLREPAPSEDVIDIKPEPDDLIDEDLNFVQEKPLSQKKPTVTLTYGSSR

SEQ ID NO: 1397 - protein, 135 aa, Homo sapiens
ASRVLAAVMGLPWGQPHLGLQMLLLALNWLRPSLSLELVPYTPQITAWDLEGKVTATTFSLEQPRCVFDGLASASDTVWLVVAFSNASRGFQNPETLADIPASPQLLTDGHYMTLPLSPDQLPCGDPMAGSGSAP

SEQ ID NO: 1398 - protein, 41 aa, Homo sapiens
NSLNNFFFETESCCVAQAGVQWRDLGSLQAPPPGFKRFSCL

SEQ ID NO: 1399 - protein, 151 aa, Homo sapiens
KSLPLQKHPKPSCQEDQGLGRGSLSGHSPLTLLTFLTSCALGDQQLLPPRTSGSLCQESMSEQSCQMSELRLLLLGKCRSGKSATGNAILGKHVFKSKFSDQTVIKMCQRESWVLRERKVVVIDTPDLFSSIACAEDKQRNIQHLLELSAP

SEQ ID NO: 1400 - protein, 324 aa, Homo sapiens
FVETTVSVQSAESSDALSWSRLPRALASVGPEEARSGAPVGGGRWQLSDRVEGGSPTLGLLGGSPSAQPGTGNVEAGIPSGRMLEPLPCWDAAKDLKEPQCPPGDRVGVQPGNSRVWQGTMEKAGLAWTRGTGVQSEGTWESQRQDSDALPSPELLPQDQDKPFLRKACSPSNIPAVIITDMGTQEDGALEETQGSPRGNLPLRKLSSSSASSTGFSSSYEDSEEDISSDPERTLDPNSAFLHTLDQQKPRVVESRSVTQAGVQWHDIGSLQPLPPWIQAILHASAFRIAGTTGACHHARIIFGFLVERGFHHVGQDGLYLLIL

SEQ ID NO: 1401 - protein, 76 aa, Homo sapiens
  misc_feature (1)...(76): Xaa = any amino acid or other as shown in Table 3
KICSSYFLRIICILQKEAQEASNLYTSCDFFSPAFYFVIYRLYNFKIHWPGAVAHTYSPSTLGGRGRWVTXGREFM

SEQ ID NO: 1402 - protein, 102 aa, Homo sapiens
LILSLPLLYGHLKSYTFPSEHYLHLLQTFATFNKYLNVCVLIFIHHKPVVPAIQGTNVGGSLEPRRLRLQQAMIVPLHFGLGNRVRPCLKKQQQQQQQQQKK

SEQ ID NO: 1403 - protein, 124 aa, Homo sapiens
  misc_feature (1)...(124): Xaa = any amino acid or other as shown in Table 3
RMETKPVITCLKTLLIIYSFVFWITGVILLAAGVWGKLTLGSYISLIAENSTYAPYVLIVTGTTIVAYPLVXFFFSYSSGFSYILAVRLIAGIALVYNYIPRSSSRALVRLVVLLRFLLSRHPS

SEQ ID NO: 1404 - protein, 136 aa, Homo sapiens
  misc_feature (1)...(136): Xaa = any amino acid or other as shown in Table 3
NAEHPGMDRHDLCQKAKLAEHAERDDDMAACMKTVTDQGAELSNEERNLLSDAHTNAVXARRSSWMGAXRIEQKTEGADTQQQMAPDCREIFATELRDICDDVLSLLEKLLIPNASHAXSLVYYLHMIGDYYRYWL

SEQ ID NO: 1405 - protein, 110 aa, Homo sapiens
  misc_feature (1)...(110): Xaa = any amino acid or other as shown in Table 3
GGGPLGKMPRAQLADPWQMMAVESPSDCADNGQQIMDEPMGEDEISPQTEXVSIKEVAVTHCVKEGHDKADPSQIELLRVLRQGSLGKVYLGKKVSGSDAKQLYAMKVLT

SEQ ID NO: 1406 - protein, 109 aa, Homo sapiens
DAAGIRHEAHFGKLECLVQLVRAGASLFVSTTRYAQTPAHIAAFGGHPQCLVWLIQAGANINKPDCEGETPIHKAARSGSLECISALVANGAHVDNPKKGIRVLEWLFE

SEQ ID NO: 1407 - protein, 305 aa, Homo sapiens
LLKLMFIAELGDYDLAEHSPELVSEFRFVPIQTEEMELAIFEKWKEYRGQTPAQAETNYLNKAKWLEMYGVDMHVVKARDGNDYSLGLTPTGVLVFEGDTKIGLFFWPKITRLDFKKNKLTLVVVEDDDQGKEQEHTFVFRLDHPKACKHLWKCAVEHHAFFRLRGPVQKSSHRSGFIRLGSRFRYSGKTEYQTTKTNKARRSTSFERRPSKRYSRRTLQMKACATKPEELSVHNNVSTQSNGSQQAWGMRSALPVSPSISSAPVPVEIENLPQSPGTDQHDRKWLSAASDCCQRGGNQWNTRAL

SEQ ID NO: 1408 - protein, 92 aa, Homo sapiens
  misc_feature (1)...(92): Xaa = any amino acid or other as shown in Table 3
ATAPGLFNFFXFLFQCREEHKKKNPEVPVNFAEFSKKCSGRWKTMSSKEKFKFGEMAKADEVCYDREMKDYGPAKGGKKKDPNAPKRPPSGF

SEQ ID NO: 1409 - protein, 169 aa, Homo sapiens
  misc_feature (1)...(169): Xaa = any amino acid or other as shown in Table 3
AEGLGSWAVWAGLGWAGRHMEAGGATGALGVGSKLPSAFCFPGSSVAMDMFQKVEKIGEGTYGVVYKAKNRETGQLVALKKIRLDLXVLGRPLSYPPWAITTWALPDPFPLSWSPRLTPLGAAQQPLPVLSPVHCLLTSLCRGPDCGVWWMTCQGAQVSIAGALVILWG

SEQ ID NO: 1410 - protein, 146 aa, Homo sapiens
LCVSVLCSFSYLQNGWTASDPVHGYWFRAGDHVSRNIPVATNNPVRAVQEETRDRFHLLGDPQNKDCTLSIRDTRESDAGTYVFCVERGNMKWNYKYDQLSVNVTASQDLLSRYRLEVPESVTVQEGLCVSVPWQCPLPPLQLDCL

SEQ ID NO: 1411 - protein, 250 aa, Homo sapiens
  misc_feature (1)...(250): Xaa = any amino acid or other as shown in Table 3
QLQLCQNCTKRGECHCVPFDTYIKTKKEKKRLSVLPPTRLMEARFSPINQILPWCRQDLAISISKAINTQEAPVKEKHARRIILGTHHEKGAFTFWSYAIGLPLPSSSILSWKFCHVLHKVLRDGHPNVLHDCQRYRSNIREIGDLWGHLHDRYGQLVNVYTKLLLTKISFHLKHPQFPAGLEVTDEVLEKAAGTDVNNMXVTLHGYMASSPRLPHSFLPRLTPRRPHGAVGLNESVALLVDAHAPRDRG

SEQ ID NO: 1412 - protein, 169 aa, Homo sapiens
  misc_feature (1)...(169): Xaa = any amino acid or other as shown in Table 3
AAPHRMPRAPHFMPLLLLLLLLSLPHTQAAFPQDPLPLLISDLQGTSPLSWLPSLEDDAVAAXLGLDFQRFLTLNRTLLVAARDHVFSFDLQAEEEGEGLVPNKYLTWRSQDVENCAVRXKLTLNRTLLVAARDHVFSFDLQAEEEGEGLVPNKYLTWRSQDVENCAVR

SEQ ID NO: 1413 - protein, 131 aa, Homo sapiens
  misc_feature (1)...(131): Xaa = any amino acid or other as shown in Table 3
HLVPKTRGRGTPSGDQSPVLTLTPXGDPPTILGPQTNQPKEHLTNFKSGKRSFHSLLQPLLLLLHPSISPFLNFGSFPFLVETEETCFIHKLKTPALVTPDSLPLVFNHCGDACLIIHPHFRDVEFHHTGN

SEQ ID NO: 1414 - protein, 365 aa, Homo sapiens
CCSTKNISGDKACNLMIFDTRKTARQPNCYLFFCPNEEACPLKPAKGLMSYRIITDFPSLTRNLPSQELPQEDSLLHGQFSQAVTPLAHHHTDYSKPTDISWRDTLSQKFGSSDHLEKLFKMDEASAQLLAYKEKGHSQSSQFSSDQEIAHLLPENVSALPATVAVASPHTTSATPKPATLLPTNASVTPSGTSQPQLATTAPPVTTVTSQPPTTLISTVFTRAAATLQAMATTAVLTTTFQAPTDSKGSLETIPFTEISNLTLNTGNVYNPTALSMSNVESSTMNKTASWEGREASPGSSSQGSVPENQYGLPFEKWLLIGSLLFGVLFLVIGLVLLGRILSESLRRKRYSRLDYLINGIYVDI

SEQ ID NO: 1415 - protein, 148 aa, Homo sapiens
  misc_feature (1)...(148): Xaa = any amino acid or other as shown in Table 3
IFAGSGVMRLKISLLKEPKHQELVSCVGWTTAEELYSCSDDHHIVKWNLLTSETTQIVKLPDDIYPIDFHWFPKSLGVKKQTHAESFVLTSSDGKFHLISKLGRVEKSVEAHCGAVLAGRWNYEGTALVTVGEDGQIXIWSKTGMLIS

SEQ ID NO: 1416 - protein, 122 aa, Homo sapiens
  misc_feature (1)...(122): Xaa = any amino acid or other as shown in Table 3
ARATTKRHFILLFLFFLRRCLFLSPRMECNGAILAHCNLHLPGSSSSSASASXVAGITDVRHHAQLILFVFLVETGFHRVGQAGLKLLTSGDLLTSASQSAGIIMGISHCAQPKKAFXTKTF

SEQ ID NO: 1417 - protein, 138 aa, Homo sapiens
  misc_feature (1)...(138): Xaa = any amino acid or other as shown in Table 3
EAGSNDDLATXKTCGRARPSSRSRQFGSRVWNHRQGVRSSPGEGAGSRSPCRRRHRRKHRRNVQSPXRRRSRSCSRRSGRCSVALLGACPVAGHSRGKVVCRRAHAITQRRRCCGFDPMVHPKEHRGXRERSRKWSRS

SEQ ID NO: 1418 - protein, 92 aa, Homo sapiens; identical to SEQ ID NO: 1408
  misc_feature (1)...(92): Xaa = any amino acid or other as shown in Table 3

SEQ ID NO: 1419 - protein, 44 aa, Homo sapiens
LTVNYVLVFSRDSGLRAIENLMQKKGKFDYILLETTGLADPGKK

SEQ ID NO: 1420 - protein, 91 aa, Homo sapiens
HEAALCRTRAVAAERHFLRVFLFFRPFRGVGTESGSESGSSKAKEPRTPSSSYGTAQYRRWPIAQEYKHCTAHNDTGTLCSELREPWRRPQ

SEQ ID NO: 1421 - protein, 190 aa, Homo sapiens
  misc_feature (1)...(190): Xaa = any amino acid or other as shown in Table 3
EGSSQANTLRSRKENRNNLLACLESHVLRXQFTESHLCSLMGDNPFQPKSNSKMAELFMECEEEELEPWQKKVKEVEDDDDDEPIFVGEISSSKPAISNILNRVNPSSYSRGLKNGALSRGITAAFKPTSQHYTNPTSNPVPASPINFHPESRSSDSSVIGQPFSKPVSVSKTIRPAQGSIGCCLSISTV

SEQ ID NO: 1422 - protein, 207 aa, Homo sapiens
CFSLEDILNFFLQGFSAGLFAFYHDKDGNPLTSRFADGLPPFNYSLGLYQWSDKVVRKVERLWDVRDNKIVRHTVYLLVTPRVVEEARKHFDCPVLEGMELENQGGVGTELNHWEKRLLENEAMTGSHTQNRVLSRITLALMEDTGRQMLSPYCDTLRSNPLQLTCRQDQRAVAVCNLQKFPKPLPQEYQYFDELSGIPAEDLPYYG

SEQ ID NO: 1423 - protein, 423 aa, Homo sapiens
AARRRRQLVSRRRTAEYPRRRRSSPSARPPDVPGQQPKAAKSPSPVQGKKSPRLLCIEKVTTDKDPKEEKEEEDDSALPQEVSIAASRPSRGWRSSRTSVSRHRDTENTRSSRSKTGSLQLICKSEPNTDQLDYDVGEEHQSPGGISSEEEEEEEEEMLISEEEIPFKDDPRDETYKPHLERETPKPRRKSGKVKEEKEKKEIKVEVEVEVKEEENEIREDEEPPRKRGRRRKDDKSPRLPKRRKKPPIQYVRCEMEGCGTVLAHPRYLQHHIKYQHLLKKKYVCPHPSCGRLFRLQKQLLRHAKHHTDQRDYICEYCARAFKSSHNLAVHRMIHTGEKPLQCEICGFTCRQKASLNWHMKKHDADSFYQFSCNICGKKFEKKDSVVAHKAKSHPEVLIAEALAANAGALITSTDILGTNPES

SEQ ID NO: 1424 - protein, 157 aa, Homo sapiens
MTANRLAESLLALSQQEELADLPKDYLLSESEDEGDNDGERKHQKLLEAISSLDGKNRRKLAERSEASLKVSEFNVSSEGSGEKLVLADLLEPVKTSSSLATVKKQLSRVKSKKTVELPLNKEEIERIHREVAFNKTAQVLSKWDPVVLKNRQAEQL

SEQ ID NO: 1425 - protein, 286 aa, Homo sapiens
  misc_feature (1)...(286): Xaa = any amino acid or other as shown in Table 3
RIDFMFHSSAMVNSHRKPMFNIHRGFYCLTAILPQICICSQFSVPSSYHFTEDPGAFPVATNGERFPWQELRLPSVVIPLHYDLFVHPNLTSLDFVASEKIEVLVSNATQLIILHSKDLEITNATLQSEEDSRYMKPGKELKVLSYPAHEQIALLVPEKLTPHLKYYVAMDFQAKLGDGFEGFYKSTYRTLGGETRILAVTDFEPTQARMAFPCFDEPLFKANFSIKIRRESRHIALSNMPKVKTIELEGGLLEDHFETTVKMSTYLVAYIDLXFPLMGNDFLGRS

SEQ ID NO: 1426 - protein, 224 aa, Homo sapiens
RSKIPRSDPRVRTPAPAEAEQGKSQCPSGSTAQSWSAMDILVPLLQLLVLLLTLPLHLMALLGCWQPLCKSYFPYLMAVLTPKSNRKMESKKRELFSQIKGLTGASGKVALLELGCGTGANFQFYPPGCRVTCLDPNPHFEKFLTKSMAENRHLQYERFVVAPGEDMRQLADGSMDVVVCTLVLCSVQSPRKVLQEVRRVLRPGGVLFFWEHVAEPYGSWAFMW

SEQ ID NO: 1427 - protein, 133 aa, Homo sapiens
RLQNSSLMDPKLGRMAASLLAVLLLLLLERGMFSSPSPPPALLEKVFQYIDLHQDEFVQTLKEWVAIESDSVQPVPRFRQELFRMMAVAADTLQRLGARVASVDMGPQQLPDGQSLPIPPVILAELGSDPTKG

SEQ ID NO: 1428 - protein, 38 aa, Homo sapiens
FFFFEMESCSVTQAGVPWHDLSSLQPPPPRFKRFSCLS

SEQ ID NO: 1429 - protein, 145 aa, Homo sapiens
DPKAQLPEPLRVLWTAHLVAMAPGSRTSLLLAFALLCLPWLQEAGAVQTVPLSRLFDHAMLQAHRAHQLAIDTYQEFEETYIPKDQKYSFLHDSQTSFCFSDSIPTPSNMEETQQKSNLELLRISLLLIESWLEPVRILMSIVPN

SEQ ID NO: 1430 - protein, 453 aa, Homo sapiens
FVKLIKKHQAAMEKEAKVMSNEEKKFQQHIQAQQKKELNSFLESQKREYKLRKEQLKEELNENQSTPKKEKQEWLSKQKENIQHFQAEEEANLLRRQRQYLELECRRFKRRMLLGRHNLEQDLVREELNKRQTQKDLEHAMLLRQHESMQELEFRHLNTIQKMRCELIRLQHQTELTNQLEYNKRRERELRRKHVMEVRQQPKSLKSKELQIKKQFQDTCKIQTRQYKALRNHLLETTPKSEHKAVLKRLKEEQTRKLAILAEQYDHSINEMLSTQALRLDEAQEAECQVLKMQLQQELELLNAYQSKIKMQAEAQHDRELRELEQRVSLRRALLEQKIEEEMLALQNERTERIRSLLERQAREIEAFDSESMRLGFSNMVLSNLSPEAFSHSYPGASGWSHNPTGGPGPHWGHPMGGPPQAWGHPMQGGPQPWGHPSGPMQGVPRGSSMGVR

SEQ ID NO: 1431 - protein, 151 aa, Homo sapiens
LAHGSFGVSDFPAPAAAPAHTLTSFSGSLSPQFRKPLGRAPAMPLVRYRKVVILGYRCVGKTSLAHQFVEGEFSEGYDPTVENTYSKIVTLGKDEFHLHLVDTAGQDEYSILPYSFIIGVHGYVLVYSVTSLHSFQVIESLYQKLHEGHGK

SEQ ID NO: 1432 - protein, 514 aa, Homo sapiens
SSPSRELCFYGFWIASSWWSRWVGSLGPGILPSPPARGRTFASVSRLPPPWSAGITLTPFLICQSGSVCPGLGAGFGVRSFHHPVARSAVLLLPLAPAAAQDSTQASTPGSPLSPTEYERFFALLTPTWKAETTCRLRATHGCRNPTLVQLDQYENHGLVPDGAVCSNLPYASWFESFCQFTHYRCSNHVYYAKRVLCSQPVSILSPNTLKEIEASAEVSPTTMTSPISPHFTVTERQTFQPWPERLSNNVEELLQSSLSLGGQEQAPEHKQEQGVEHRQEPTQEHKQEEGQKQEEQEEEQEEEGKQEEGQGTKEGREAVSQLQTDSEPKFHSESLSSNPSSFAPRVREVESTPMIMENIQELIRSAQEIDEMNEIYDENSYWRNQNPGSLLQLPHTEALLVLCYSIVENTCIITPTAKAWKYMEEEILGFGKSVCDSLGRRHMSTCALCDFCSLKLEQCHSEASLQRQQCDTSHKTPFVSPLLASQSLSIGNQVGSPESGRFYGLDLYGGLHM

SEQ ID NO: 1433 - protein, 241 aa, Homo sapiens
  misc_feature (1)...(241): Xaa = any amino acid or other as shown in Table 3
VSWVPSKDGDVEGARRPFTRLNTSLGPGLQEGRRRTWLVPIPGAVLPGRTQEQPRASPLYXPGAPPCQPQGLVAGPWAQXAGLRSDGFGPWPWRLVGTAGPREKKVQKSKCWHFRCGRHPARRSGWAGRHASLLATGRPCSSAPSQQPLGTAGDSRQELLRPPLVXVNGAQSSAAGDWGSSPRTAQALARPHRLGHHPAAVAPAARLRTQSGHSPRGPLCRSPGSPRRMGTWRGPAGHSHD

SEQ ID NO: 1434 - protein, 127 aa, Homo sapiens; identical to SEQ ID NO: 1343

SEQ ID NO: 1435 - protein, 182 aa, Homo sapiens
GECFIMAAVVQQNDLVFEFASNVMEDERQLGDPAIFPAVIVEHVPGADILNSYAGLACVEEPNDMITESSLDVAEEEIIDDDDDDITLTVEASCHDGDETIETIEAAEALLNMDSPGPMLDEKRINNNIFSSPEDDMVVAPVTHVSVTLDGIPEVMETQQVQEKYADSPGASSPEQPKRKKK

SEQ ID NO: 1436 - protein, 154 aa, Homo sapiens
HEASGVSRALLQSAPGTPATVGISVGELWPFARCCSHSYVRSLRGLSVSTHLLCFTIYIMNPSMKQKQEEIKENIKTSSVPRRTLKMIQPSASGSLVGRENELSAGLSKRKHRNDHLTSTTSSPGVIVPESSENKNLGGVTQESFDLMIKGMKK

SEQ ID NO: 1437 - protein, 63 aa, Homo sapiens
PLPARGKSTLPATFCSPSAPELASMSVVPPNRSQTGWPRGVTQFGNKYIQQTKPLTLERTINL

SEQ ID NO: 1438 - protein, 140 aa, Homo sapiens
AEGEDVPPLPTSSGDGWEKDLEEALEAGGCDLETLRNIIQGRPLPADLRAKVWKIALNVAGKGDSLASWDGILDLPEQNTIHKDCLQFIDQLSVPEEKAAELLLDIESVITFYCKSRNIKYSTSLSWIHLLKPLVHLQLP

SEQ ID NO: 1439 - protein, 84 aa, Homo sapiens
ALPKFLTHGVKSNERVVVWLFPPSFRAATMVHMNVLPDALKSINNAERRGKPQVLIRLCSKIIIWFLTVMVKYGYIGKFEPTRP

SEQ ID NO: 1440 - protein, 255 aa, Homo sapiens
AMAQYGHPSPLGMAAREELYSKVTPRRNRQQRPGTIKHGSALDVLLSMGFPRARAQKALASTGGRSVQAACDWLFSHVGDPFLDDPLPREYVLYLRPTGPLAQKLSDFWQQSKQICGKNKAHNIFPHITLCQFFMCEDSKVDALGEALQTTVSRWKCKFSAPLPLELYTSSNFIGLFVKEDSAEVLKKFAADFAAEAASKTEVHVEPHKKQLHVTLAYHFQASHLPTLEKLAQNIDVKLGCDWVATIFSRDIRFA

SEQ ID NO: 1441 - protein, 134 aa, Homo sapiens
QTRPASPRTARESVLGVSQNMSFNLQSSKKLFIFLGKSLFSLLEAMIFALLPKPRKNVAGEIVLITGAGSGLGRLLALQFARLGSVLVLWDINKEGNEETCKMAREAGATRVHAYTCDCSQKEGVYRVADQVKK

SEQ ID NO: 1442 - protein, 155 aa, Homo sapiens [sequence omitted]

SEQ ID NO: 1443 - protein, 157 aa, Homo sapiens
PAPAARSRELLKELRNGQDMDTVVFEDVVVDFTLEEWALLNPAQRKLYRDVMLETFKHLASVDNEAQLKASGSISQQDTSGEKLSLKQKIEKFTRKNIWASLLGKNWEEHSVKDKHNTKERHLSRNPRVERPCKSSKGNKRGRTFRKTRNCNRHLRR

SEQ ID NO: 1444 - protein, 53 aa, Homo sapiens
CVCGFFVCFETKSCFVAQAGVQWHNLSSLQALPPGFKQFSCLSLLSSWHYRRV

SEQ ID NO: 1445 - protein, 106 aa, Homo sapiens
GTRLRRRREAVWFEVVNMDFSRLHMYSPPQCVPENTGYTYALSSSYSSDALDFETEHKLDPVFDSPRMSRRSLRLATTACTLGDGEAVGADSGTSSAVSLKNRAAR

SEQ ID NO: 1446 - protein, 95 aa, Homo sapiens
DTMQAVVPLNKMTAISPEPQTLASTEQNEVPRVVTSGEQEAILRGNAADAESFRQRFRWFCYSEVAGPRKALSQLWELCNQWLRPDIHTKEQILE

SEQ ID NO: 1447 - protein, 127 aa, Homo sapiens
PICLFSRPTLRPSRSKVSLIEGRGANMAARWRFWCVSVTMVVALLIVCDVPSASAQRKKEMVLSEKVSQLMEWTNKRPVIRMNGDKFRRLVKAPPRNYSVIVMFTALQLHRQCVVCKYELQLRFKIK

SEQ ID NO: 1448 - protein, 143 aa, Homo sapiens
QMRVKDPTKALPEKAKRSKRPTVPHDEDSSDDIAVGLTCQHVSHAISVNHVKRAIAENLWSVCSECLKERRFYDGQLVLTSDIWLCLKCGFQGCGKNSESQHSLKHFKSSRTEPHCIIINLSTWIIWWYEWDEKIFTPLNKKG

SEQ ID NO: 1449 - protein, 121 aa, Homo sapiens
  misc_feature (1)...(121): Xaa = any amino acid or other as shown in Table 3
AKERGEERQGEGGGWLSGSRWPLVRSAFVPAPSSLILSMCLSPGIPEAAPDSPLTASAPTPXVMLLGDTGVGKTCFLIQFKDGAFLSGTFIATVGIDFRVRWLQALASSREPGLWLRHGGV

SEQ ID NO: 1450 - protein, 76 aa, Homo sapiens
FYPRSSADLPFQTTRCEFQTSVMELAHSLLLNEEALAQITEAKRPVFIFEWLRFLDKVLVAANKVWYCSFFPVALT

SEQ ID NO: 1451 - protein, 95 aa, Homo sapiens
MNMKQKSVYQQTKALLCKNFLKKWRMKRESLLEWGLSILLGLCIALFSSSMRNVQFPGMAPQNLGRVDKFNSSSLMVVYTPISNLTQQIMNKTAL

SEQ ID NO: 1452 - protein, 174 aa, Homo sapiens
SPQGNGCPDVTGDSVIRVPLTLLVHNLAGLTGLLHHCLSGPLPAPSPPPAMSSSRKDHLGASSSEPLPVIIVGNGPSGICLSYLLSGYTPYTKPDAIHPHPLLQRKLTEAPGVSILDQDLDYLSEGLEGRSQSPVALLFDALLRPDTDFGGNMKSVLTWKHRKEHAIPHVVLGR

SEQ ID NO: 1453 - protein, 518 aa, Homo sapiens
NRRTRAQRCQRGRSCGAREEEVEPGTARPPPAASAMDASLEKIADPTLAEMGKNLKEAVKMLEDSQRRTEEENGKKLISGDIPGPLQGSGQDMVSILQLVQNLMHGDEDEEPQSPRIQNIGEQGHMALLGHSLGAYISTLDKEKLRKLTTRILSDTTLWLCRIFRYENGCAYFHEEEREGLAKICRLAIHSRYEDFVVDGFNVLYNKKPVIYLSAAARPGLGQYLCNQLGLPFPCLCRVPCNTVFGSQHQMDVAFLEKLIKDDIERGRLPLLLVANAGTAAVGHTDKIGRLKELCEQYGIWLHVEGVNLATLALGYVSSSVLAAAKCDSMTMTPGPWLGLPAVPAVTLYKHDDPALTLVAGLTSNKPTDKLRALPLWLSLQYLGLDGFVERIKHACQLSQRLQESLKKVNYIKILVEDELSSPVVVFRFFQELPGSDPVFKAVPVPNMTPSGVGRERHSCDALNRWLGEQLKQLVPASGLTVMDLEAEGTCLRFSPLMTAAGKPGLVDIPCFCSGAAG

SEQ ID NO: 1454 - protein, 185 aa, Homo sapiens
LCIMDTKEEKKERKQSYFARLKKKKQAKQNAETASAVATRTHTGKEDNNTVVLEPDKCNIAVEEEYMTDEKKKRKSNQLKEIRRTELKRYYSIDDNQNKTHDKKEKKMVVQKPHGTMEYTAGNQDTLNSIALKFNITPNKLVELNKLFTHTIVPGQVLFVPDANSPSSTLRLSSSSPGATVSPSS

SEQ ID NO: 1455 - protein, 206 aa, Homo sapiens
SAGGDSCRAVPMLRFPTCFPSFRVVGEKQLPQEIIFLVWSPKRDLIALANTAGEVLLHRLASFHRVWSFPPNENTGKEVTCLAWRPDGKLLAFALADTKKIVLCDVEKPESLHSFSVEAPVSCMHWMEVTVESSVLTSFYNAEDESNLLLPKLPTLPKNYSNTSKIFSEENSDEIIKLLGDVRLNILVLGGSSGFIELYAYGMFKI

SEQ ID NO: 1456 - protein, 100 aa, Homo sapiens
PRDPVTDRARAMPRRGLVAGPDLEYFQRHYFTPAEVAQHNRPEDLWVSYLGRVYDLTSLAQEYKGNLLLKPIVEVAGQDISHWFDPKTRDVSYAGTWDCG

SEQ ID NO: 1457 - protein, 159 aa, Homo sapiens
RIPGRRFRAAFVLGSANVASSVRLRCSFPLSLGGPSGPAAASVALGPAGPGRSLGRTPDTGDWEMDSVSFEDVAVAFTQEEWALLDPSQKNLYRDVMQEIFRNLASVGNKSEDQNIQDDFKNPGRNLSSHVVERLFEIKEGSQYGETFSQDSNLNLNKI

SEQ ID NO: 1458 - protein, 154 aa, Homo sapiens
SLSLSVSPFLRLSLGRVGGMAEEMESSLEASFSSSGAVSGASGFLPPARSRIFKIIVIGDSNVGKTCLTYRFCAGRFPDRTEATIGVDFRERAVEIDGERIKIQLWDTAGQERFRKSMVQHYYRNVHAVVFVYDMTNMASFHSLPSWIEECKQH

SEQ ID NO: 1459 - protein, 136 aa, Homo sapiens
RRPSPGSIVIMAAESDVLHFQFEQQGDVVLQKMNLLRQQNLFCDVSIYINDTEFQGHKVILAACSTFMRDQFLLTQSKHVRITILQSAEVGRKLLLSCYTGALEVKRKELLKYLTAASYLQMVHIAEKRTEAFVKF

SEQ ID NO: 1460 - protein, 219 aa, Homo sapiens
AEGLQSAAGIRIDTKAGPPEMLKPLWKAAVAPTWPCSMPPRRPWDRQAGTLQVLGALAVLWLGSVALICLLWQVPRPPTWGQVQPKDVPRSWEHGSSPAWEPLEAEARQQRDSCQLVLVESIPQDLPSAAGSPSAQPLGQAWLQLLDTAQESVHVASYYWSLTGPDIGVNDSSSQLGEALLQKLQQLLGRNISLAVATSSPTLARTSTDLQVLAARGAH

SEQ ID NO: 1461 - protein, 80 aa, Homo sapiens
RKKKMPLPFGLKLKRTRRYTVSSKSCLVARIQLLNNEFVEFTLSVESTGQESLEAVAQRLELREVTYFSLWYYNKQNQRR

SEQ ID NO: 1462 - protein, 175 aa, Homo sapiens
LQPLSSWESASEVTRSPVSPEDVKQATSNFENLQKQLARKMKLPIFIADAFTARAFRGNPAAVCLLENELDEDMHQKIAREMNLSETAFIRKLHPTDNFAQSSCFGLRWFTPASEVPLCGHATLASAAVLFHKIKNMNSTLTFVTLSGELRARRAEDGIVLDLPLYPAHPQDFHE

SEQ ID NO: 1463 - protein, 150 aa, Homo sapiens
AADTMQSDDVIWDTLGNKQFCSFKIRTKTQSFCRNEYSLTGLCNRSSCPLANSQYATIKEEKGQCYLYMKVIERAAFPRRLWERVRLSKNYEKALEQIDENLIYWPRFIRHKCKQRFTKITQYLIRIRKLTLKRQRKLVPLSKKVERREK

SEQ ID NO: 1464 - protein, 86 aa, Homo sapiens
FVERGLGDPALPTLMFEEPEWAEAAPVAAGLGPVISRPPPAASSQNKVSDSREQWELFQAAKRTLVDPSAVCIAGRDTCGTVKGES

SEQ ID NO: 1465 - protein, 286 aa, Homo sapiens; identical to SEQ ID NO: 1340

SEQ ID NO: 1466 - protein, 127 aa, Homo sapiens
GCYAPSPHLGGSLTPRFFPNGVFHRRLPRPRPPQPPSVSSAPTLRPLCAHFSLGKLRLRVRKSAEVAPPRTEKGWGSAEPRHSRAPLGLQGLRMAASAQVSVTFEDVAVTFTQEEWGQLDAAQRTLY

SEQ ID NO: 1467 - protein, 146 aa, Homo sapiens
FRGSLSSPSSLRGRRLVTGQTSPRGTWCLYPGFCRSVACAMPCCSHRSCREDPGTSESREMDPVVFEDVAVNFTQEEWTLLDISQKNLFREVMLETFRNLTSIGKKWSDQNIEYEYQNPRRSFRSLIEEKVNEIKEDSHCGETFTQ

SEQ ID NO: 1468 - protein, 44 aa, Homo sapiens
LNFANSAAFAVTMPQNEYIELHRKRYGFRLDYHEKKRKKQSREA

SEQ ID NO: 1469 - protein, 198 aa, Homo sapiens
SGDLSPAELMMLTIGDVIKQLIEAHEQGKDIDLNKVKTKTAAKYGLSAQPRLVDIIAAVPPQYRKVLMPKLKAKPIRTASGIAVVAVMCKPHRCPHISFTGNICVYCPGGPDSDFEYSTQSYTGYEPTSMRAIRARYDPFLQTRHRIEQLKQLGHSVDKVEFIEMGGTFMALPEEYRDYFIRNLHDALSGHTSNNIYE

SEQ ID NO: 1470 - protein, 178 aa, Homo sapiens
WESDVGEGLRPPPPPPPPGRRRTQEPRARDAATVIFACPAALLETLIAYGSSSPSFCKHRAARPLIFLLHRLTAEATARCPICALEARNPGRWGICASWPGMKTPFGKAAAGQRSRTGAGHGSVSVTMIKRKAAHKKHRSRPTSQPRGNIVGCIIQHGWKDGDEPLTQWKGTVLDQLL

SEQ ID NO: 1471 - protein, 253 aa, Homo sapiens
RDLGVALEAFQWARAGDCGSGAGRAGGEGVDAGRRVPERQHRGRGGGGEPGRRQRGGRRQRSSSRRSGGDGGDEVEGSGVGAGEGETVQHFPLARPKSLMQKLQCSFQTSWLKDFPWLRYSKDTGLMSCGWCQKTPADGGSVDLPPVGHDELSRGTRNYKKTLLLRHHVSTEHKLHEANAQESEIPSEEGYCDFNSRPNENSYCYQLLRQLNEQRKKGILCDVSIVVSGKIFKAHKNILVAGSRFFKTLYCFS

SEQ ID NO: 1472 - protein, 147 aa, Homo sapiens
SLRAAAAMADVTARSLQYEYKANSNLVLQADRSLIDRTRRDEPTGEVLSLVGKLEGTRMGDKAQRTKPQMQEERRAKRRKRDEDRHDINKMKGYTLLSEGIDEMVGIIYKPKTKETRETYEVLLSFIQAALGDQPRDILCGAADEVL

SEQ ID NO: 1473 - protein, 139 aa, Homo sapiens
CNSAESRMDVLFVAIFAVPLILGQEYEDEERLGEDEYYQVVYYYTVTPSYDDFSADFTIDYSIFESEDRLNRLDKDITEAIETTISLETARADHPKPVTVKPVTTEPQSPDLNDAVSSLRSPIPLLLSCAFVQVGMYFM

SEQ ID NO: 1474 - protein, 185 aa, Homo sapiens
  misc_feature (1)...(185): Xaa = any amino acid or other as shown in Table 3
FVRGPGEEQAPAFRKPAPGAMGAQVRLPPGEPCREGYVLSLVCPNSSQAWCEITNVSQLLASPVLYTDLNYSINNLSISANVENKYSLYVGLVLAVSSSIFIGSSFILKKKGLLQLASKGFTRAGQGGHSYLKEWLWWVGLLSILSWNAREKVDLXNITFXPQTSCIFFTITIEKSTFLSYFPTS

SEQ ID NO: 1475 - protein, 91 aa, Homo sapiens
ARGSCPTRPRPANGRMAETKDAAQMLVTFKDVAVTFTREEWRQLDLAQRTLYREVMLETCGLLVSLGHRVPKPELVHLLKHGQELWIVKRG

SEQ ID NO: 1476 - protein, 159 aa, Homo sapiens
YTMLRGTMTAWRGMRPEVTLACLLLATAGCFADLNEVPQVTVQPASTVQKPGGTVILGCVVEPPRMNVTWRLNGKELNGSDDALGVLITHGTLVITALNNHTVGRYQCVARMPAGAVASVPATVTLASESAPLPPCHGAVPPHLSHPEAPTIHAASCYS

SEQ ID NO: 1477 - protein, 139 aa, Homo sapiens
WGRRRQLVSEAARAQGDPVCSTMSEEEAAQIPRSSVWEQDQQNVVQRVVALPLVRATCTAVCDVYSAAKDRHPLLGSACRLAENCVCGLTTRALDHAQPLLEHLQPQLATMNSLACRGLDKLEEKLPFLQQPSETVVTS

SEQ ID NO: 1478 - protein, 331 aa, Homo sapiens
  misc_feature (1)...(331): Xaa = any amino acid or other as shown in Table 3
AKAFTMAESPGCCSVWARCLHCLYSCHWRKCPRERMQTSKCDCIWFGLLFLTFLLSLSWLYIGLVLLNDLHNFNEFLFRRWGHWMDWSLAFLLVISLLGTYASLLLVLALLLRLCRQPLHLHSLHKVLLLLIMLLVAAGLVGLDIQWQQERHSLRVSLQDCRXLXTPAVRPXEESGEGHWRRAHLTSSCPQATAPFLHIGAAAGIALLAWPVADTFYRIHRREPKILLLLLFFGVVLVIYLAPLCISSPCIMEPRDLPPKPGLVGHRGAPMLAPENTLMSLRKTAECGATVFETDVMVSSDGVPFLMHDEHLSRTTNVASVFPTRITAHSS
